(19) United States
(12) Patent Application Publication
(10) Pub. No.: US 2019/0085377 A1
(43) Pub. Date: Mar. 21, 2019

(54) GENETIC TESTING FOR PREDICTING RESISTANCE OF SALMONELLA SPECIES AGAINST ANTIMICROBIAL AGENTS

(71) Applicant: Ares Genetics GmbH, Vienna (AT)

(72) Inventors: Andreas Keller, Puttlingen (DE); Susanne Schmolke, Erlangen (DE); Cord Friedrich Stahler, Hirschberg an der Bergstrasse (DE); Christina Backes, Saarbrucken (DE); Valentina Galata, Saarbrucken (DE)

(21) Appl. No.: 15/745,330

(22) PCT Filed: Jul. 21, 2016
(86) PCT No.: PCT/EP2016/067437

§ 371 Date: Jan. 16, 2018

(30) Foreign Application Priority Data
Jul. 22, 2015 (EP) PCT/EP2015/066711

(51) Int. Cl. C12Q 1/689; C12Q 1/6827; C12Q 1/04; G16H 50/20; G16H 50/30

(52) U.S. Cl. CPC C12Q 1/689; C12Q 1/6827; C12Q 1/04; G16H 50/20; G16H 50/30; C12Q 2600/136; G06F 19/22; G06F 19/18; C12Q 2600/156; C12Q 2600/106; G06F 19/28

(57) ABSTRACT

The invention relates to a method of determining an infection of a patient with Salmonella species potentially resistant to antimicrobial drug treatment, a method of selecting a treatment of a patient suffering from an antibiotic resistant Salmonella infection, and a method of determining an antibiotic resistance profile for bacterial microorganisms of Salmonella species, as well as computer program products used in these methods. In an exemplary method, a sample 1 is used for molecular testing 2, and then a molecular fingerprint 3 is taken. The result is then compared to a reference library 4, and the result 5 is reported.

[0001] The present invention relates to a method of determining an infection of a patient with Salmonella species potentially resistant to antimicrobial drug treatment, a method of selecting a treatment of a patient suffering from an infection with a potentially resistant Salmonella strain, and a method of determining an antimicrobial drug, e.g. antibiotic, resistance profile for bacterial microorganisms of Salmonella species, as well as computer program products used in these methods.

[0002] Antibiotic resistance is a form of drug resistance whereby a sub-population of a microorganism, e.g. a strain of a bacterial species, can survive and multiply despite exposure to an antibiotic drug. It is a serious and health concern for the individual patient as well as a major public health issue. Timely treatment of a bacterial infection requires the analysis of clinical isolates obtained from patients with regard to antibiotic resistance, in order to select an efficacious therapy. Generally, for this purpose an association of the identified resistance with a certain microorganism (i.e. ID) is necessary.

[0003] Antibacterial drug resistance (ADR) represents a major health burden. According to the World Health Organization's antimicrobial resistance global report on surveillance, ADR leads to 25,000 deaths per year in Europe and 23,000 deaths per year in the US. In Europe, 2.5 million extra hospital days lead to societal cost of 1.5 billion euro. In the US, the direct cost of 2 million illnesses leads to 20 billion dollar direct cost. The overall cost is estimated to be substantially higher, reducing the gross domestic product (GDP) by up to 1.6%.

[0004] Salmonellae are Gram-negative, flagellated, facultatively anaerobic bacilli belonging to the family of Enterobacteriaceae. Determination of antigenic structure permits one to identify the organisms clinically and assign them to one of nine serogroups (A-I), each containing many serovars (=serotypes).

[0005] Salmonellae are ubiquitous human and animal pathogens, and salmonellosis is common throughout the world. Salmonellosis in humans ranges clinically from the common Salmonella gastroenteritis (diarrhea, abdominal cramps, and fever) to enteric fevers (including typhoid fever) which are life-threatening febrile systemic illness requiring prompt antibiotic therapy. Particular serovars show a strong propensity to produce a particular syndrome (S typhi, S paratyphi-A, and S schottmuelleri produce enteric fever; S choleraesuis produces septicemia or focal infections; S typhimurium and S enteritidis produce gastroenteritis); however, on occasion, any serotype can produce any of the syndromes.

[0006] In general, more serious infections occur in infants, in adults over the age of 50, and in subjects with debilitating illnesses.

[0007] In a recent report by CDC (Centers for Disease Control and Prevention), titled Antibiotic Resistance Threats in the United States, 2013, drug-resistant, nontyphoidal Salmonella was listed among bacteria that pose a serious threat level. Nontyphoidal Salmonella causes approximately 1.2 million illnesses, 23,000 hospitalizations, and 450 deaths each year in the United States. Direct medical costs are estimated to be $365 million annually. Of concern, surveillance data reveal that an increasing proportion of nontyphoidal Salmonella are resistant to ceftriaxone or ciprofloxacin, drugs representing classes of antibiotics commonly used to treat severe salmonellosis. Taking into account all of the classes of antibiotics for which testing is done at CDC, about 5% of nontyphoidal Salmonella tested by CDC are resistant to antibiotics in 5 or more classes.

[0008] In general the mechanisms for resistance of bacteria against antimicrobial treatments rely to a very substantial part on the organism's genetics. The respective genes or molecular mechanisms are either encoded in the genome of the bacteria or on plasmids that can be interchanged between different bacteria. The most common resistance mechanisms include:
[0009] 1) Efflux pumps are high-affinity reverse transport systems located in the membrane that transports the antibiotic out of the cell, e.g. resistance to tetracycline.
[0010] 2) Specific enzymes modify the antibiotic in a way that it loses its activity. In the case of streptomycin, the antibiotic is chemically modified so that it will no longer bind to the ribosome to block protein synthesis.
[0011] 3) An enzyme is produced that degrades the antibiotic, thereby inactivating it. For example, the penicillinases are a group of beta-lactamase enzymes that cleave the beta lactam ring of the penicillin molecule.

[0012] In addition, some pathogens show natural resistance against drugs. For example, an organism can lack a transport system for an antibiotic or the target of the antibiotic molecule is not present in the organism.

[0013] Pathogens that are in principle susceptible to drugs can become resistant by modification of existing genetic material (e.g. spontaneous mutations for antibiotic resistance, happening in a frequency of one in about 100 mio bacteria in an infection) or the acquisition of new genetic material from another source. One example is horizontal gene transfer, a process where genetic material contained in small packets of DNA can be transferred between individual bacteria of the same species or even between different species. Horizontal gene transfer may happen by transduction, transformation or conjugation.

[0014] Generally, testing for susceptibility/resistance to antimicrobial agents is performed by culturing organisms in different concentration of these agents.

[0015] In brief, agar plates are inoculated with patient sample (e.g. urine, sputum, blood, stool) overnight. On the next day individual colonies are used for identification of organisms, either by culturing or using mass spectroscopy. Based on the identity of organisms new plates containing increasing concentration of drugs used for the treatment of these organisms are inoculated and grown for additional 12-24 hours. The lowest drug concentration which inhibits growth (minimal inhibitory concentration—MIC) is used to determine susceptibility/resistance for tested drugs. The process takes at least 2 to 3 working days during which the patient is treated empirically. A significant reduction of time-to-result is needed especially in patients with life-threatening disease and to overcome the widespread misuse of antibiotics.

[0016] Recent developments include PCR based test kits for fast bacterial identification (e.g. Biomerieux Biofire Tests, Curetis Unyvero Tests). With these test the detection of selected resistance loci is possible for a very limited number of drugs, but no correlation to culture based AST is given. Mass spectroscopy is increasingly used for identification of pathogens in clinical samples (e.g. Bruker Biotyper), and research is ongoing to establish methods for the detection of susceptibility/resistance against antibiotics.

[0017] For some drugs such it is known that at least two targets are addressed, e.g. in case of Ciprofloxacin (drug bank ID 00537; http://www.drugbank.ca/drugs/DB00537) targets include DNA Topoisomerase IV, DNA Topoisomerase II and DNA Gyrase. It can be expected that this is also the case for other drugs although the respective secondary targets have not been identified yet. In case of a common regulation, both relevant genetic sites would naturally show a co-correlation or redundancy.

[0018] It is known that drug resistance can be associated with genetic polymorphisms. This holds for viruses, where resistance testing is established clinical practice (e.g. HIV genotyping). More recently, it has been shown that resistance has also genetic causes in bacteria and even higher organisms, such as humans where tumors resistance against certain cytostatic agents can be linked to genomic mutations.

[0019] Wozniak et al. (BMC Genomics 2012, 13(Suppl 7):S23) disclose genetic determinants of drug resistance in Staphylococcus aureus based on genotype and phenotype data. Stoesser et al. disclose prediction of antimicrobial susceptibilities for Escherichia coli and Klebsiella pneumoniae isolates using whole genomic sequence data (J Antimicrob Chemother 2013; 68: 2234-2244).

[0020] Chewapreecha et al (Chewapreecha et al (2014) Comprehensive Identification of single nucleotid polymorphisms associated with beta-lactam resistance within pneumococcal mosaic genes. PLoS Genet 10(8): e1004547) used a comparable approach to identify mutations in gram-positive Streptococcus Pneumonia.

[0021] The fast and accurate detection of infections with Salmonella species and the prediction of response to anti-microbial therapy represent a high unmet clinical need.

[0022] This need is addressed by the present invention.

### SUMMARY OF THE INVENTION

[0023] The present inventors addressed this need by carrying out whole genome sequencing of a large cohort of Salmonella clinical isolates and comparing the genetic mutation profile to classical culture based antimicrobial susceptibility testing with the goal to develop a test which can be used to detect bacterial susceptibility/resistance against antimicrobial drugs using molecular testing.

[0024] The inventors performed extensive studies on the genome of bacteria of Salmonella species either susceptible or resistant to antimicrobial, e.g. antibiotic, drugs. Based on this information, it is now possible to provide a detailed analysis on the resistance pattern of Salmonella strains based on individual genes or mutations on a nucleotide level. This analysis involves the identification of a resistance against individual antimicrobial, e.g. antibiotic, drugs as well as clusters of them. This allows not only for the determination of a resistance to a single antimicrobial, e.g. antibiotic, drug, but also to groups of antimicrobial drugs, e.g. antibiotics such as lactam or quinolone antibiotics, or even to all relevant antibiotic drugs.

[0025] Therefore, the present invention will considerably facilitate the selection of an appropriate antimicrobial, e.g. antibiotic, drug for the treatment of a Salmonella infection in a patient and thus will largely improve the quality of diagnosis and treatment.

[0026] According to a first aspect, the present invention discloses a diagnostic method of determining an infection of a patient with Salmonella species potentially resistant to antimicrobial drug treatment, which can be also described as a method of determining an antimicrobial drug, e.g. antibiotic, resistant

[0027] Salmonella infection of a patient, comprising the steps of:

a) obtaining or providing a sample containing or suspected of containing at least one Salmonella species from the patient;
b) determining the presence of at least one mutation in at least two genes from the group of genes listed in Table 1 or

[0028] Table 2 below, wherein the presence of said at least two mutations is indicative of an infection with an antimicrobial drug resistant, e.g. antibiotic resistant, Salmonella strain in said patient.

[0029] An infection of a patient with Salmonella species potentially resistant to antimicrobial drug treatment herein means an infection of a patient with Salmonella species wherein it is unclear if the Salmonella species is susceptible to treatment with a specific antimicrobial drug or if it is resistant to the antimicrobial drug.

[0030] In step b) above, as well as corresponding steps, at least one mutation in at least two genes is determined, so that in total at least two mutations are determined, wherein the two mutations are in different genes.

TABLE 1
List of genes

| | | | | |
|---|---|---|---|---|
| recN | hemH | UMN798_3428 | metE | yijD |
| UMN798_4831 | UMN798_1939 | copS | UMN798_0628 | UMN798_4878 |
| leuB | recF | emrA | glyQ | dcp |
| thiH | UMN798_1612 | UMN798_2909 | UMN798_1680 | UMN798_4073 |
| yjbC | nadB | UMN798_3160 | hutU | envC |
| UMN798_3889 | UMN798_1629 | bcfB | degQ | UMN798_1331 |
| trg | uvrC | polB | hpcD | UMN798_1628 |
| UMN798_1701 | glgS | plsB | yjcC | feoB |
| misL | dxr | hemF | rnfG | yhjB |
| UMN798_1163 | UMN798_0394 | alkA | nhaA | lspA |

TABLE 2
List of genes

| | | | | |
|---|---|---|---|---|
| recN | hemH | UMN798_3428 | metE | yijD |
| UMN798_4831 | UMN798_1939 | copS | UMN798_0628 | UMN798_4878 |
| leuB | recF | emrA | glyQ | dcp |
| thiH | UMN798_1612 | UMN798_2909 | UMN798_1680 | UMN798_4073 |
| yjbC | nadB | UMN798_3160 | hutU | envC |
| UMN798_3889 | UMN798_1629 | bcfB | degQ | UMN798_1331 |
| trg | uvrC | polB | hpcD | UMN798_1628 |
| UMN798_1701 | glgS | plsB | yjcC | feoB |
| misL | dxr | hemF | rnfG | yhjB |
| UMN798_1163 | UMN798_0394 | alkA | nhaA | lspA |

[0031] According to a second aspect, the present invention relates to a method of selecting a treatment of a patient suffering from an infection with a potentially resistant Salmonella strain, e.g. from an antimicrobial drug, e.g. antibiotic, resistant Salmonella infection, comprising the steps of:

a) obtaining or providing a sample containing or suspected of containing at least one Salmonella species from the patient;
b) determining the presence of at least one mutation in at least two genes from the group of genes listed in Table 1 or Table 2 above, wherein the presence of said at least two mutations is indicative of a resistance to one or more antimicrobial, e.g. antibiotic, drugs;
c) identifying said at least one or more antimicrobial, e.g. antibiotic, drugs; and
d) selecting one or more antimicrobial, e.g. antibiotic, drugs different from the ones identified in step c) and being suitable for the treatment of a Salmonella infection.

[0032] A third aspect of the present invention relates to a method of determining an antimicrobial drug, e.g. antibiotic, resistance profile for bacterial microorganisms of Salmonella species, comprising:

obtaining or providing a first data set of gene sequences of a plurality of clinical isolates of Salmonella species; providing a second data set of antimicrobial drug, e.g. antibiotic, resistance of the plurality of clinical isolates of Salmonella species;
aligning the gene sequences of the first data set to at least one, preferably one, reference genome of Salmonella, and/or assembling the gene sequence of the first data set, at least in part;
analyzing the gene sequences of the first data set for genetic variants to obtain a third data set of genetic variants; correlating the third data set with the second data set and statistically analyzing the correlation; and
determining the genetic sites in the genome of Salmonella associated with antimicrobial drug, e.g. antibiotic, resistance.

[0033] In addition, the present invention relates in a fourth aspect to a method of determining an antimicrobial drug, e.g. antibiotic, resistance profile for a bacterial microorganism belonging to the species Salmonella comprising the steps of

a) obtaining or providing a sample containing or suspected of containing the bacterial microorganism;
b) determining the presence of a mutation in at least one gene of the bacterial microorganism as determined by the method according to the third aspect of the present invention;
wherein the presence of a mutation is indicative of a resistance to an antimicrobial, e.g. antibiotic, drug.

[0034] Furthermore, the present invention discloses in a fifth aspect a diagnostic method of determining an infection of a patient with Salmonella species potentially resistant to antimicrobial drug treatment, which can, like in the first aspect, also be described as method of determining an antimicrobial drug, e.g. antibiotic, resistant Salmonella infection of a patient, comprising the steps of:

a) obtaining or providing a sample containing or suspected of containing a bacterial microorganism belonging to the species Salmonella from the patient;
b) determining the presence of at least one mutation in at least one gene of the bacterial microorganism belonging to the species Salmonella as determined by the method according to the third aspect of the present invention, wherein the presence of said at least one mutation is indicative of an antimicrobial drug, e.g. antibiotic, resistant Salmonella infection in said patient.

[0035] Also disclosed is in a sixth aspect a method of selecting a treatment of a patient suffering from an infection with a potentially resistant Salmonella strain, e.g. from an antimicrobial drug, e.g. antibiotic, resistant Salmonella infection, comprising the steps of:

a) obtaining or providing a sample containing or suspected of containing a bacterial microorganism belonging to the species Salmonella from the patient;
b) determining the presence of at least one mutation in at least one gene of the bacterial microorganism belonging to the species Salmonella as determined by the method according to the third aspect of the present invention, wherein the presence of said at least one mutation is indicative of a resistance to one or more antimicrobial, e.g. antibiotic, drugs;
c) identifying said at least one or more antimicrobial, e.g. antibiotic, drugs; and
d) selecting one or more antimicrobial, e.g. antibiotic, drugs different from the ones identified in step c) and being suitable for the treatment of a Salmonella infection.

[0036] A seventh aspect of the present invention relates to a method of acquiring, respectively determining, an antimicrobial drug, e.g. antibiotic, resistance profile for a bacterial microorganism of Salmonella species, comprising:

obtaining or providing a first data set of gene sequences of a clinical isolate of Salmonella species;
providing a second data set of antimicrobial drug, e.g. antibiotic, resistance of a plurality of clinical isolates of Salmonella species;
aligning the gene sequences of the first data set to at least one, preferably one, reference genome of Salmonella, and/or assembling the gene sequence of the first data set, at least in part;
analyzing the gene sequences of the first data set for genetic variants to obtain a third data set of genetic variants of the first data set;
correlating the third data set with the second data set and statistically analyzing the correlation; and
determining the genetic sites in the genome of Salmonella of the first data set associated with antimicrobial drug, e.g. antibiotic, resistance.

[0037] According to an eighth aspect, the present invention discloses a computer program product comprising executable instructions which, when executed, perform a method according to the third, fourth, fifth, sixth or seventh aspect of the present invention.

[0038] Further aspects and embodiments of the invention are disclosed in the dependent claims and can be taken from the following description, figures and examples, without being limited thereto.

### FIGURES

[0039] The enclosed drawings should illustrate embodiments of the present invention and convey a further understanding thereof. In connection with the description they serve as explanation of concepts and principles of the invention. Other embodiments and many of the stated advantages can be derived in relation to the drawings. The elements of the drawings are not necessarily to scale towards each other. Identical, functionally equivalent and acting equal features and components are denoted in the figures of the drawings with the same reference numbers, unless noted otherwise.

[0040] FIG. 1 shows schematically a read-out concept for a diagnostic test according to a method of the present invention.

### DETAILED DESCRIPTION OF THE PRESENT INVENTION

### Definitions

[0041] Unless defined otherwise, technical and scientific terms used herein have the same meaning as commonly understood by one of ordinary skill in the art to which this invention belongs.

[0042] An “antimicrobial drug” in the present invention refers to a group of drugs that includes antibiotics, antifungals, antiprotozoals, and antivirals. According to certain embodiments, the antimicrobial drug is an antibiotic.

[0043] The term “nucleic acid molecule” refers to a polynucleotide molecule having a defined sequence. It comprises DNA molecules, RNA molecules, nucleotide analog molecules and combinations and derivatives thereof, such as DNA molecules or RNA molecules with incorporated nucleotide analogs or cDNA.

[0044] The term “nucleic acid sequence information” relates to information which can be derived from the sequence of a nucleic acid molecule, such as the sequence itself or a variation in the sequence as compared to a reference sequence.

[0045] The term “mutation” relates to a variation in the sequence as compared to a reference sequence. Such a reference sequence can be a sequence determined in a predominant wild type organism or a reference organism, e.g. a defined and known bacterial strain or substrain. A mutation is for example a deletion of one or multiple nucleotides, an insertion of one or multiple nucleotides, or substitution of one or multiple nucleotides, duplication of one or a sequence of multiple nucleotides, translocation of one or a sequence of multiple nucleotides, and, in particular, a single nucleotide polymorphism (SNP).

[0046] In the context of the present invention a “sample” is a sample which comprises at least one nucleic acid molecule from a bacterial microorganism. Examples for samples are: cells, tissue, body fluids, biopsy specimens, blood, urine, saliva, sputum, plasma, serum, cell culture supernatant, swab sample and others. According to certain embodiments, the sample is a patient sample (clinical isolate).

[0047] New and highly efficient methods of sequencing nucleic acids referred to as next generation sequencing have opened the possibility of large scale genomic analysis. The term “next generation sequencing” or “high throughput sequencing” refers to high-throughput sequencing technologies that parallelize the sequencing process, producing thousands or millions of sequences at once. Examples include Massively Parallel Signature Sequencing (MPSS), Polony sequencing, 454 pyrosequencing, Illumina (Solexa) sequencing, SOLiD sequencing, Ion semiconductor sequencing, DNA nanoball sequencing, Helioscope™ single molecule sequencing, Single Molecule SMRT™ sequencing, Single Molecule real time (RNAP) sequencing, Nanopore DNA sequencing, Sequencing By Hybridization, Amplicon Sequencing, GnuBio.

[0048] Within the present description the term “microorganism” comprises the term microbe. The type of microorganism is not particularly restricted, unless noted otherwise or obvious, and, for example, comprises bacteria, viruses, fungi, microscopic algae and protozoa, as well as combinations thereof. According to certain aspects, it refers to one or more Salmonella species, particularly Salmonella_choleraesuis, Salmonella_dublin, Salmonella_enterica_ssp_arizonae, Salmonella_enterica_ssp_diarizoniae, Salmonella_enteritidis, Salmonella_gallinarum, Salmonella_Group_A, Salmonella_Group_B, Salmonella_Group_C, Salmonella_Group_D, Salmonella_heidelberg, Salmonella_miami, Salmonella_newport, Salmonella_panama, Salmonella_parahaemolyticus_A, Salmonella_paratyphi_A, Salmonella_paratyphi_B, Salmonella_pullorum, Salmonella_senfienberg, Salmonella_species, Salmonella_species_Lac_--,_ONPG_+, Salmonella_species_Lac_+,_ONPG_+, Salmonella_subgenus_I, Salmonella_subgenus_II, Salmonella_subgenus_IV, Salmonella_subgroup_I_Suc+, Salmonella_tennessee, and/or Salmonella_typhi.

[0049] A reference to a microorganism or microorganisms in the present description comprises a reference to one microorganism as well a plurality of microorganisms, e.g. two, three, four, five, six or more microorganisms.

[0050] A vertebrate within the present invention refers to animals having a vertebrae, which includes mammals—including humans, birds, reptiles, amphibians and fishes. The present invention thus is not only suitable for human medicine, but also for veterinary medicine.

[0051] According to certain embodiments, the patient in the present methods is a vertebrate, more preferably a mammal and most preferred a human patient.

[0052] Before the invention is described in exemplary detail, it is to be understood that this invention is not limited to the particular component parts of the process steps of the methods described herein as such methods may vary. It is also to be understood that the terminology used herein is for purposes of describing particular embodiments only, and is not intended to be limiting. It must be noted that, as used in the specification and the appended claims, the singular forms “a,” “an” and “the” include singular and/or plural referents unless the context clearly dictates otherwise. For example, the term “a” as used herein can be understood as one single entity or in the meaning of “one or more” entities. It is also to be understood that plural forms include singular and/or plural referents unless the context clearly dictates otherwise. It is moreover to be understood that, in case parameter ranges are given which are delimited by numeric values, the ranges are deemed to include these limitation values.

[0053] Regarding the dosage of the antimicrobial, e.g. antibiotic, drugs, it is referred to the established principles of pharmacology in human and veterinary medicine. For example, Forth, Henschler, Rummel “Allgemeine und spezielle Pharmakologie und Toxikologie”, 9th edition, 2005, pp. 781 919, might be used as a guideline. Regarding the formulation of a ready-to-use medicament, reference is made to “Remington, The Science and Practice of Pharmacy”, 22^{nd} edition, 2013, pp. 777-1070.

[0054] Assembling of a gene sequence can be carried out by any known method and is not particularly limited.

[0055] According to certain embodiments, mutations that were found using alignments can also be compared or matched with alignment-free methods, e.g. for detecting single base exchanges, for example based on contigs that were found by assemblies. For example, reads obtained from sequencing can be assembled to contigs and the contigs can be compared to each other.

[0056] According to a first aspect, the present invention relates to a diagnostic method of determining an infection of a patient with Salmonella species potentially resistant to antimicrobial drug treatment, which can also be described as method of determining an antimicrobial drug, e.g. antibiotic, resistant Salmonella infection of a patient, comprising the steps of:

a) obtaining or providing a sample containing or suspected of containing at least one Salmonella species from the patient;
b) determining the presence of at least one mutation in at least two genes from the group of genes consisting of recN, hemH, UMN798_3428, metE, yijD, UMN798_4831, UMN798_1939, copS, UMN798_0628, UMN798_4878, leuB, recF, emrA, glyQ, dcp, thiH, UMN798_1612, UMN798_2909, UMN798_1680, UMN798_4073, yjbC, nadB, UMN798_3160, hutU, envC, UMN798_3889, UMN798_1629, bcfB, degQ, UMN798_1331, trg, uvrC, polB, hpcD, UMN798_1628, UMN798_1701, glgS, plsB, yjcC, feoB, misL, dxr, hemF, rnfG, yhjB, UMN798_1163, UMN798_0394, alkA, nhaA, and lspA, wherein the presence of said at least two mutations is indicative of an infection with an antimicrobial, e.g. antibiotic, resistant Salmonella strain in said patient.

[0057] In this method, as well as the other methods of the invention, the sample can be provided or obtained in any way, preferably non-invasive, and can be e.g. provided as an in vitro sample or prepared as in vitro sample.

[0058] According to certain aspects, mutations in at least two, three, four, five, six, seven, eight, nine or ten genes are determined in any of the methods of the present invention, e.g. in at least two genes or in at least three genes. Instead of testing only single genes or mutants, a combination of several variant positions can improve the prediction accuracy and further reduce false positive findings that are influenced by other factors. Therefore, it is in particular preferred to determine the presence of a mutation in 2, 3, 4, 5, 6, 7, 8 or 9 (or more) genes selected from Table 1 or 2.

[0059] For the above genes, i.e. the genes also denoted in Tables 1 and 2, the highest probability of a resistance to at least one antimicrobial drug, e.g. antibiotic, could be observed, with p-values smaller than 10⁻³⁰, particularly smaller than 10⁻⁴⁰, indicating the high significance of the values (n=636; α=0.05). Details regarding Tables 1 and 2 can be taken from Tables 3 and 4 (4a, 4b, 4c) disclosed in the Examples. Having at least two genes with mutations determined, a high probability of an antimicrobial drug, e.g. antibiotic, resistance could be determined. The genes in Table 1 thereby represent the 50 best genes for which a mutation was observed in the genomes of Salmonella species, whereas the genes in Table 2 represent the 50 best genes for which a cross-correlation could be observed for the antimicrobial drug, e.g. antibiotic, susceptibility testing for Salmonella species as described below.

[0060] According to certain embodiments, the obtaining or providing a sample containing or suspected of containing at least one Salmonella species from the patient in this method—as well as the other methods of the invention—can comprise the following:

A sample of a vertebrate, e.g. a human, e.g. is provided or obtained and nucleic acid sequences, e.g. DNA or RNA sequences, are recorded by a known method for recording nucleic acid, which is not particularly limited. For example, nucleic acid can be recorded by a sequencing method, wherein any sequencing method is appropriate, particularly sequencing methods wherein a multitude of sample components, as e.g. in a blood sample, can be analyzed for nucleic acids and/or nucleic acid fragments and/or parts thereof contained therein in a short period of time, including the nucleic acids and/or nucleic acid fragments and/or parts thereof of at least one microorganism of interest, particularly of at least one Salmonella species. For example, sequencing can be carried out using polymerase chain reaction (PCR), particularly multiplex PCR, or high throughput sequencing or next generation sequencing, preferably using high-throughput sequencing. For sequencing, preferably an in vitro sample is used.

[0061] The data obtained by the sequencing can be in any format, and can then be used to identify the nucleic acids, and thus genes, of the microorganism, e.g. of Salmonella species, to be identified, by known methods, e.g. fingerprinting methods, comparing genomes and/or aligning to at least one, or more, genomes of one or more species of the microorganism of interest, i.e. a reference genome, etc., forming a third data set of aligned genes for a Salmonella species—discarding additional data from other sources, e.g. the vertebrate. Reference genomes are not particularly limited and can be taken from several databases. Depending on the microorganism, different reference genomes or more than one reference genomes can be used for aligning. Using the reference genome—as well as also the data from the genomes of the other species, e.g. Salmonella species—mutations in the genes for each species and for the whole multitude of samples of different species, e.g. Salmonella species, can be obtained.

[0062] For example, it is useful in genome-wide association studies to reference the points of interest, e.g. mutations, to one constant reference for enhanced standardization. In case of the human with a high consistency of the genome and 99% identical sequences among individuals this is easy and represents the standard, as corresponding reference genomes are available in databases. In case of organisms that trigger infectious diseases (e.g. bacteria and viruses) this is much more difficult, though. One possibility is to fall back on a virtual pan genome which contains all sequences of a certain genus. A further possibility is the analysis of all available references, which is much more complex. Therein all n references from a database (e.g. RefSeq) are extracted and compared with the newly sequenced bacterial genomes k. After this, matrices (% of mapped reads, % of covered genome) are applied to estimate which reference is best suited to all new bacteria. However, n×k complete alignments are carried out. Having a big number of references, though, stable results can be obtained, as is the case for Salmonella.

[0063] According to certain embodiments, the genomes of Salmonella species are referenced to one reference genome. However, it is not excluded that for other microorganisms more than one reference genome is used. In the present methods, the reference genome of Salmonella is NC_017046 as annotated at the NCBI according to certain embodiments. The reference genome is attached to this application as sequence listing with SEQ ID NO 1.

[0064] The reference sequence was obtained from Salmonella strain NC_017046 (http://www.genome.jp/dbgetbin/www_bget?refseq+NC_017046)

LOCUS NC_017046 4876219 bp DNA circular CON 1 Mar. 2015 DEFINITION Salmonella enterica subsp. enterica serovar Typhimurium str. 798, complete genome.

### ACCESSION NC_017046

### VERSION NC_017046.1 GI:383494824

### DBLINK BioProject: PRJNA224116

[0065] BioSample: SAMN02604223
[0066] Assembly: GCF 000252875.1

### KEYWORDS RefSeq.

[0067] SOURCE Salmonella enterica subsp. enterica serovar Typhimurium str. 798
ORGANISM Salmonella enterica subsp. enterica serovar Typhimurium str. 798
[0068] Bacteria; Proteobacteria; Gammaproteobacteria; Enterobacteriales;
[0069] Enterobacteriaceae; Salmonella.
   REFERENCE 1 (bases 1 to 4876219)
[0070] AUTHORS Patterson, S. K., Borewicz, K., Johnson, T., Xu, W. and Isaacson, R. E.
[0071] TITLE Characterization and differential gene expression between two phenotypic phase variants in Salmonella enterica serovar Typhimurium
[0072] JOURNAL PLoS ONE 7 (8), E43592 (2012)
[0073] PUBMED 22937065
   REFERENCE 2 (bases 1 to 4876219)
[0074] AUTHORS Borewicz, K., Johnson, T. J. and Isaacson, R. E.
[0075] TITLE Direct Submission
[0076] JOURNAL Submitted (28 Jan. 2012) Veterinary and Biomedical Sciences, University of Minnesota, 1971 Commonwealth Avenue, 205 Vet Science, Saint Paul, Minn. 55108, USA

[0077] Alternatively or in addition, the gene sequence of the first data set can be assembled, at least in part, with known methods, e.g. by de-novo assembly or mapping assembly. The sequence assembly is not particularly limited, and any known genome assembler can be used, e.g. based on Sanger, 454, Solexa, Illumina, SOLid technologies, etc., as well as hybrids/mixtures thereof.

[0078] According to certain embodiments, the data of nucleic acids of different origin than the microorganism of interest, e.g. Salmonella species, can be removed after the nucleic acids of interest are identified, e.g. by filtering the data out. Such data can e.g. include nucleic acids of the patient, e.g. the vertebrate, e.g. human, and/or other microorganisms, etc. This can be done by e.g. computational subtraction, as developed by Meyerson et al. 2002. For this, also aligning to the genome of the vertebrate, etc., is possible. For aligning, several alignment-tools are available. This way the original data amount from the sample can be drastically reduced.

[0079] Also after such removal of “excess” data, fingerprinting and/or aligning, and/or assembly, etc. can be carried out, as described above, forming a third data set of aligned and/or assembled genes for a Salmonella species.

[0080] Using these techniques, genes with mutations of the microorganism of interest, e.g. Salmonella species, can be obtained for various species.

[0081] When testing these same species for antimicrobial drug, e.g. antibiotic, susceptibility of a number of antimicrobial drugs, e.g. antibiotics, e.g. using standard culturing methods on dishes with antimicrobial drug, e.g. antibiotic, intake, as e.g. described below, the results of these antimicrobial drug, e.g. antibiotic, susceptibility tests can then be cross-referenced/correlated with the mutations in the genome of the respective microorganism, e.g. Salmonella. Using several, e.g. 50 or more than 50, 100 or more than 100, 200 or more than 200, 300 or more than 300, 400 or more than 400, 500 or more than 500, or 600 or more than 600 different species of a microorganism, e.g. different Salmonella species, statistical analysis can be carried out on the obtained cross-referenced data between mutations and antimicrobial drug, e.g. antibiotic, susceptibility for these number of species, using known methods.

[0082] Regarding culturing methods, samples can be e.g. cultured overnight. On the next day individual colonies can be used for identification of organisms, either by culturing or using mass spectroscopy. Based on the identity of organisms new plates containing increasing concentration of antibiotics used for the treatment of these organisms are inoculated and grown for additional 12-24 hours. The lowest drug concentration which inhibits growth (minimal inhibitory concentration —MIC) can be used to determine susceptibility/resistance for tested antibiotics.

[0083] Correlation of the nucleic acid/gene mutations with antimicrobial drug, e.g. antibiotic, resistance can be carried out in a usual way and is not particularly limited. For example, resistances can be correlated to certain genes or certain mutations, e.g. SNPs, in genes. After correlation, statistical analysis can be carried out.

[0084] In addition, statistical analysis of the correlation of the gene mutations with antimicrobial drug, e.g. antibiotic, resistance is not particularly limited and can be carried out, depending on e.g. the amount of data, in different ways, for example using analysis of variance (ANOVA) or Student's t-test, for example with a sample size n of 50 or more, 100 or more, 200 or more, 300 or more, 400 or more, 500 or more, or 600 or more, and a level of significance (α-error-level) of e.g. 0.05 or smaller, e.g. 0.05, preferably 0.01 or smaller. A statistical value can be obtained for each gene and/or each position in the genome as well as for all antibiotics tested, a group of antibiotics or a single antibiotic. The obtained p-values can also be adapted for statistical errors, if needed.

[0085] For statistically sound results a multitude of individuals should be sampled, with n=50, 100, 200, 300, 400, 500 or 600, and a level of significance (α-error-level) of e.g. 0.05 or smaller, e.g. 0.05, preferably 0.01 or smaller. According to certain embodiments, particularly significant results can be obtained for n=200, 300, 400, 500 or 600.

[0086] For statistically sound results a multitude of individuals should be sampled, with n=50 or more, 100 or more, 200 or more, 300 or more, 400 or more, 500 or more, or 600 or more, and a level of significance (α-error-level) of e.g. 0.05 or smaller, e.g. 0.05, preferably 0.01 or smaller. According to certain embodiments, particularly significant results can be obtained for n=200 or more, 300 or more, 400 or more, 500 or more, or 600 or more.

[0087] After the above procedure has been carried out for more than 600, e.g. 636, individual species of Salmonella, the data disclosed in Tables 1 and 2 were obtained for the statistically best correlations between gene mutations and antimicrobial drug, e.g. antibiotic, resistances. Thus, mutations in these genes were proven as valid markers for antimicrobial drug, e.g. antibiotic, resistance.

[0088] According to a further aspect, the present invention relates in a second aspect to a method of selecting a treatment of a patient suffering from an infection with a potentially resistant Salmonella strain, e.g. from an antimicrobial drug, e.g. antibiotic, resistant Salmonella infection, comprising the steps of:

a) obtaining or providing a sample containing or suspected of containing at least one Salmonella species from the patient;
b) determining the presence of at least one mutation in at least two genes from the group of genes consisting of recN, hemH, UMN798_3428, metE, yijD, UMN798_4831, UMN798_1939, copS, UMN798_0628, UMN798_4878, leuB, recF, emrA, glyQ, dcp, thiH, UMN798_1612, UMN798_2909, UMN798_1680, UMN798_4073, yjbC, nadB, UMN798_3160, hutU, envC, UMN798_3889, UMN798_1629, bcfB, degQ, UMN798_1331, trg, uvrC, polB, hpcD, UMN798_1628, UMN798_1701, glgS, plsB, yjcC, feoB, misL, dxr, hemF, rnfG, yhjB, UMN798_1163, UMN798_0394, alkA, nhaA, and lspA, wherein the presence of said at least two mutations is indicative of a resistance to one or more antimicrobial, e.g. antibiotic, drugs;
c) identifying said at least one or more antimicrobial, e.g. antibiotic, drugs; and
d) selecting one or more antimicrobial, e.g. antibiotic, drugs different from the ones identified in step c) and being suitable for the treatment of a Salmonella infection.

[0089] In this method, the steps a) of obtaining or providing a sample and b) of determining the presence of at least one mutation are as in the method of the first aspect.

[0090] The identification of the at least one or more antimicrobial, e.g. antibiotic, drug in step c) is then based on the results obtained in step b) and corresponds to the antimicrobial, e.g. antibiotic, drug(s) that correlate(s) with the mutations. Once these antimicrobial drugs, e.g. antibiotics, are ruled out, the remaining antimicrobial drugs, e.g. antibiotic drugs/antibiotics, can be selected in step d) as being suitable for treatment.

[0091] In the description, references to the first and second aspect also apply to the 14^{th}, 15^{th}, 16^{th} and 17^{th} aspect, referring to the same genes, unless clear from the context that they don't apply.

[0092] According to certain embodiments, the antimicrobial drug, e.g. antibiotic, in the method of the first or second aspect, as well as in the other methods of the invention, is at least one selected from the group of β-lactams, β-lactam inhibitors, quinolines and derivatives thereof, aminoglycosides, polyketides, respectively tetracyclines, and folate synthesis inhibitors, particularly at least one selected from the group of β-lactams, β-lactam inhibitors, quinolines and derivatives thereof, aminoglycosides, and polyketides, respectively tetracyclines.

[0093] In the methods of the invention the resistance of Salmonella to one or more antimicrobial, e.g. antibiotic, drugs can be determined according to certain embodiments.

[0094] According to certain embodiments of the first and/or second aspect of the invention the antimicrobial, e.g. antibiotic, drug is selected from lactam antibiotics, and the presence of a mutation in the following genes is determined: recN, hemH, UMN798_3428, metE, yijD, UMN798_4831, UMN798_1939, copS, UMN798_0628, UMN798_4878, leuB, recF, emrA, glyQ, dcp, thiH, UMN798_1612, UMN798_2909, UMN798_1680, UMN798_4073, yjbC, nadB, UMN798_3160, hutU, envC, UMN798_3889, UMN798_1629, bcfB, degQ, UMN798_1331, trg, uvrC, polB, hpcD, UMN798_1628, UMN798_1701, glgS, plsB, yjcC, feoB, misL, dxr, hemF, rnfG, yhjB, UMN798_1163, UMN798_0394, alkA, nhaA, lspA.

[0095] According to certain embodiments of the first and/or second aspect of the invention the antimicrobial, e.g. antibiotic, drug is selected from aminoglycoside antibiotics, and the presence of a mutation in the following genes is determined: recN, hemH, UMN798_3428, metE, yijD, UMN798_4831, UMN798_1939, copS, UMN798_0628, UMN798_4878, leuB, recF, emrA, glyQ, dcp, thiH, UMN798_1612, UMN798_2909, UMN798_1680, UMN798_4073, yjbC, nadB, UMN798_3160, hutU, envC, UMN798_3889, UMN798_1629, bcfB, degQ, UMN798_1331, trg, uvrC, polB, hpcD, UMN798_1628, UMN798_1701, glgS, plsB, yjcC, feoB, misL, dxr, hemF, rnfG, yhjB, UMN798_1163, UMN798_0394, alkA, nhaA, lspA.

[0096] According to certain embodiments of the first and/or second aspect of the invention the antimicrobial, e.g. antibiotic, drug is selected from polyketide antibiotics, preferably tetracycline antibiotics, and the presence of a mutation in the following genes is determined: recN, hemH, UMN798_3428, metE, yijD, UMN798_4831, UMN798_1939, copS, UMN798_0628, UMN798_4878, leuB, recF, emrA, glyQ, dcp, thiH, UMN798_1612, UMN798_2909, UMN798_1680, UMN798_4073, yjbC, nadB, UMN798_3160, hutU, envC, UMN798_3889, UMN798_1629, bcfB, UMN798_1331, trg, uvrC, polB, hpcD, UMN798_1628, UMN798_1701, glgS, plsB, yjcC, feoB, misL, dxr, hemF, rnfG, yhjB, UMN798_1163, UMN798_0394, alkA, nhaA, lspA.

[0097] According to certain embodiments, the antimicrobial drug is an antibiotic/antibiotic drug.

[0098] According to certain embodiments of the first and/or second aspect of the invention, determining the nucleic acid sequence information or the presence of a mutation comprises determining the presence of a single nucleotide at a single position in a gene. Thus the invention comprises methods wherein the presence of a single nucleotide polymorphism or mutation at a single nucleotide position is detected.

[0099] According to certain embodiments, the antibiotic drug in the methods of the present invention is selected from the group consisting of Amoxicillin/K Clavulanate (AUG), Ampicillin (AM), Aztreonam (AZT), Cefazolin (CFZ), Cefepime (CPE), Cefotaxime (CFT), Ceftazidime (CAZ), Ceftriaxone (CAX), Cefuroxime (CRM), Cephalotin (CF), Ciprofloxacin (CP), Ertapenem (ETP), Gentamicin (GM), Imipenem (IMP), Levofloxacin (LVX), Meropenem (MER), Piperacillin/Tazobactam (P/T), Ampicillin/Sulbactam (A/S), Tetracycline (TE), Tobramycin (TO), and Trimethoprim/Sulfamethoxazole (T/S).

[0100] The inventors have surprisingly found that mutations in certain genes are indicative not only for a resistance to one single antimicrobial, e.g. antibiotic, drug, but to groups containing several drugs.

[0101] According to certain embodiments of the first and/or second aspect of the invention, the gene is from Table 1 or Table 2, the antibiotic drug is selected from lactam antibiotics and a mutation in at least one of the following genes is detected with regard to reference genome NC_017046: recN, hemH, UMN798_3428, metE, yijD, UMN798_4831, UMN798_1939, copS, UMN798_0628, UMN798_4878, leuB, recF, emrA, glyQ, dcp, thiH, UMN798_1612, UMN798_2909, UMN798_1680, UMN798_4073, yjbC, nadB, UMN798_3160, hutU, envC, UMN798_3889, UMN798_1629, bcfB, degQ, UMN798_1331, trg, uvrC, polB, hpcD, UMN798_1628, UMN798_1701, glgS, plsB, yjcC, feoB, misL, dxr, hemF, rnfG, yhjB, UMN798_1163, UMN798_0394, alkA, nhaA, lspA.

[0102] According to certain embodiments of the first and/or second aspect of the invention, the gene is from Table 1 or Table 2, the antibiotic drug is selected from aminoglycoside antibiotics and a mutation in at least one of the following genes is detected with regard to reference genome NC_017046: recN, hemH, UMN798_3428, metE, yijD, UMN798_4831, UMN798_1939, copS, UMN798_0628, UMN798_4878, leuB, recF, emrA, glyQ, dcp, thiH, UMN798_1612, UMN798_2909, UMN798_1680, UMN798_4073, yjbC, nadB, UMN798_3160, hutU, envC, UMN798_3889, UMN798_1629, bcfB, degQ, UMN798_1331, trg, uvrC, polB, hpcD, UMN798_1628, UMN798_1701, glgS, plsB, yjcC, feoB, misL, dxr, hemF, rnfG, yhjB, UMN798_1163, UMN798_0394, alkA, nhaA, lspA.

[0103] According to certain embodiments of the first and/or second aspect of the invention, the gene is from Table 1 or Table 2, the antibiotic drug is selected from polyketide, preferably tetracycline antibiotics and a mutation in at least one of the following genes is detected with regard to reference genome NC_017046: recN, hemH, UMN798_3428, metE, yijD, UMN798_4831, UMN798_1939, copS, UMN798_0628, UMN798_4878, leuB, recF, emrA, glyQ, dcp, thiH, UMN798_1612, UMN798_2909, UMN798_1680, UMN798_4073, yjbC, nadB, UMN798_3160, hutU, envC, UMN798_3889, UMN798_1629, bcfB, UMN798_1331, trg, uvrC, polB, hpcD, UMN798_1628, UMN798_1701, glgS, plsB, yjcC, feoB, misL, dxr, hemF, rnfG, yhjB, UMN798_1163, UMN798_0394, alkA, nhaA, lspA.

[0104] For specific antimicrobial drugs, e.g. antibiotics, specific positions in the above genes can be determined where a high statistical significance is observed. The inventors found that, apart from the above genes indicative of a resistance against antibiotics, also single nucleotide polymorphisms (=SNP's) may have a high significance for the presence of a resistance against defined antibiotic drugs. The analysis of these polymorphisms on a nucleotide level may further improve and accelerate the determination of a drug resistance to antimicrobial drugs, e.g. antibiotics, in Salmonella.

[0105] According to certain embodiments of the first and/or second aspect of the invention, the gene is from Table 1 or Table 2, the antibiotic drug is selected from lactam antibiotics and a mutation in at least one of the following nucleotide positions is detected with regard to reference genome NC_017046: 2833888, 546961, 3334479, 4191057, 4366486, 4724403, 1895588, 1139812, 637461, 4779417, 131219, 4062015, 2983118, 3861998, 1548464, 4397111, 1574737, 2840330, 1650934, 3966175, 4436188, 2780306, 3075942, 855087, 3582301, 3772654, 1590194, 25574, 3536122, 1313897, 1673475, 1994028, 115342, 1148509, 1589819, 1672517, 3379140, 4478134, 4523874, 3686566, 3976726, 258966, 2558379, 1487086, 3799879, 1163470, 409259, 2208848, 46695, 56998, 3582354, 3335426, 1673444.

[0106] According to certain embodiments of the first and/or second aspect of the invention, the gene is from Table 1 or Table 2, the antibiotic drug is selected from aminoglycoside antibiotics and a mutation in at least one of the following nucleotide positions is detected with regard to reference genome NC_017046: 2833888, 546961, 3334479, 4191057, 4366486, 4724403, 1895588, 1139812, 637461, 4779417, 131219, 4062015, 2983118, 3861998, 1548464, 4397111, 1574737, 2840330, 1650934, 3966175, 4436188, 2780306, 3075942, 855087, 3582301, 3772654, 1590194, 25574, 3536122, 1313897, 1673475, 1994028, 115342, 1148509, 1589819, 1672517, 3379140, 4478134, 4523874, 3686566, 3976726, 258966, 2558379, 1487086, 3799879, 1163470, 409259, 2208848, 46695, 56998, 3582354, 3335426, 1673444.

[0107] According to certain embodiments of the first and/or second aspect of the invention, the gene is from Table 1 or Table 2, the antibiotic drug is selected from polyketide, preferably tetracycline antibiotics and a mutation in at least one of the following nucleotide positions is detected with regard to reference genome NC_017046: 2833888, 546961, 3334479, 4191057, 4366486, 4724403, 1895588, 1139812, 637461, 4779417, 131219, 4062015, 2983118, 3861998, 1548464, 4397111, 1574737, 2840330, 1650934, 3966175, 4436188, 2780306, 3075942, 855087, 3582301, 3772654, 1590194, 25574, 1313897, 1673475, 1994028, 115342, 1148509, 1589819, 1672517, 3379140, 4478134, 4523874, 3686566, 3976726, 258966, 2558379, 1487086, 3799879, 1163470, 409259, 2208848, 46695, 56998, 3582354, 3335426, 1673444.

[0108] According to certain embodiments of the first and/or second aspect of the invention, the antibiotic drug is CFZ and a mutation in at least one of the following nucleotide positions is detected with regard to reference genome NC_017046: 4779417, 2983118, 1548464, 1574737, 3772654, 1313897.

[0109] According to certain embodiments of the first and/or second aspect of the invention, the antibiotic drug is GM and a mutation in at least one of the following nucleotide positions is detected with regard to reference genome NC_017046: 2840330, 25574, 3536122, 115342, 1148509, 3379140, 4478134, 3686566, 1487086, 3799879, 1163470, 2208848, 46695, 56998, 3335426.

[0110] According to certain embodiments of the first and/or second aspect of the invention, the antibiotic drug is CF and a mutation in at least one of the following nucleotide positions is detected with regard to reference genome NC_017046: 2833888, 546961, 3334479, 4191057, 4366486, 4724403, 1895588, 1139812, 637461, 4779417, 131219, 4062015, 2983118, 3861998, 1548464, 4397111, 1574737, 1650934, 4436188, 3075942, 855087, 3582301, 3772654, 1590194, 1313897, 1673475, 1994028, 1589819, 1672517, 3976726, 3582354, 1673444.

[0111] According to certain embodiments of the first and/or second aspect of the invention, the antibiotic drug is TE and a mutation in at least one of the following nucleotide positions is detected with regard to reference genome NC_017046: 2833888, 546961, 3334479, 4191057, 4366486, 4724403, 1895588, 1139812, 637461, 4779417, 131219, 4062015, 2983118, 3861998, 1548464, 4397111, 1574737, 2840330, 1650934, 3966175, 4436188, 2780306, 3075942, 855087, 3582301, 3772654, 1590194, 25574, 1313897, 1673475, 1994028, 115342, 1148509, 1589819, 1672517, 3379140, 4478134, 4523874, 3686566, 3976726, 258966, 2558379, 1487086, 3799879, 1163470, 409259, 2208848, 46695, 56998, 3582354, 3335426, 1673444.

[0112] According to certain embodiments of the first and/or second aspect of the invention, the antibiotic drug is A/S and a mutation in at least one of the following nucleotide positions is detected with regard to reference genome NC_017046: 2833888, 546961, 3334479, 4191057, 4366486, 4724403, 1895588, 1139812, 637461, 4779417, 131219, 4062015, 2983118, 3861998, 1548464, 4397111, 1574737, 2840330, 1650934, 3966175, 4436188, 2780306, 3075942, 855087, 3582301, 3772654, 1590194, 25574, 3536122, 1313897, 1673475, 1994028, 115342, 1148509, 1589819, 1672517, 3379140, 4478134, 4523874, 3686566, 3976726, 258966, 2558379, 1487086, 3799879, 1163470, 409259, 2208848, 46695, 56998, 3582354, 3335426, 1673444.

[0113] According to certain embodiments of the first and/or second aspect of the invention, the antibiotic drug is CRM and a mutation in at least one of the following nucleotide positions is detected with regard to reference genome NC_017046: 2833888, 546961, 3334479, 4191057, 4366486, 4724403, 1895588, 1139812, 637461, 4779417, 131219, 4062015, 2983118, 3861998, 1548464, 4397111, 1574737, 2840330, 1650934, 3966175, 4436188, 2780306, 3075942, 855087, 3582301, 3772654, 1590194, 25574, 3536122, 1313897, 1673475, 1994028, 115342, 1148509, 1589819, 1672517, 3379140, 4478134, 4523874, 3686566, 3976726, 258966, 2558379, 1487086, 3799879, 1163470, 409259, 2208848, 46695, 56998, 3582354, 3335426, 1673444.

[0114] According to certain embodiments of the first and/or second aspect of the invention, the antibiotic drug is P/T and a mutation in at least one of the following nucleotide positions is detected with regard to reference genome NC_017046: 2833888, 546961, 3334479, 4191057, 4366486, 4724403, 1895588, 1139812, 637461, 4779417, 131219, 4062015, 2983118, 3861998, 1548464, 4397111, 1574737, 2840330, 1650934, 3966175, 4436188, 2780306, 3075942, 855087, 3582301, 3772654, 1590194, 25574, 3536122, 1313897, 1673475, 1994028, 115342, 1148509, 1589819, 1672517, 3379140, 4478134, 4523874, 3686566, 3976726, 258966, 2558379, 1487086, 3799879, 1163470, 409259, 2208848, 46695, 56998, 3582354, 3335426, 1673444.

[0115] According to certain embodiments of the first and/or second aspect of the invention, the antibiotic drug is TO and a mutation in at least one of the following nucleotide positions is detected with regard to reference genome NC_017046: 2833888, 546961, 3334479, 4191057, 4366486, 4724403, 1895588, 1139812, 637461, 4779417, 131219, 4062015, 2983118, 3861998, 1548464, 4397111, 1574737, 2840330, 1650934, 3966175, 4436188, 2780306, 3075942, 855087, 3582301, 3772654, 1590194, 25574, 3536122, 1313897, 1673475, 1994028, 115342, 1148509, 1589819, 1672517, 3379140, 4478134, 4523874, 3686566, 3976726, 258966, 2558379, 1487086, 3799879, 1163470, 409259, 2208848, 46695, 56998, 3582354, 3335426, 1673444.

[0116] According to certain embodiments of the first and/or second aspect of the invention, the antibiotic drug is AM and a mutation in at least one of the following nucleotide positions is detected with regard to reference genome NC_017046: 2833888, 546961, 3334479, 4191057, 4366486, 4724403, 1895588, 1139812, 637461, 4779417, 131219, 4062015, 2983118, 3861998, 1548464, 4397111, 1574737, 2840330, 1650934, 3966175, 4436188, 2780306, 3075942, 855087, 3772654, 25574, 3536122, 1313897, 1994028, 115342, 1148509, 3379140, 4478134, 4523874, 3686566, 3976726, 258966, 2558379, 1487086, 3799879, 1163470, 409259, 2208848, 46695, 56998, 3335426.

[0117] According to certain embodiments of the first and/or second aspect of the invention, the antibiotic drug is AUG and a mutation in at least one of the following nucleotide positions is detected with regard to reference genome NC_017046: 2833888, 546961, 3334479, 4191057, 4366486, 4724403, 1895588, 1139812, 637461, 4779417, 131219, 4062015, 2983118, 3861998, 1548464, 4397111, 1574737, 2840330, 1650934, 3966175, 4436188, 2780306, 3075942, 855087, 3582301, 3772654, 1590194, 25574, 3536122, 1313897, 1673475, 1994028, 115342, 1148509, 1589819, 1672517, 3379140, 4478134, 4523874, 3686566, 3976726, 258966, 2558379, 1487086, 3799879, 1163470, 409259, 2208848, 46695, 56998, 3582354, 3335426, 1673444.

[0118] According to certain embodiments of the first and/or second aspect of the invention, the resistance of a bacterial microorganism belonging to the species Salmonella against 1, 2, 3, 4, 5, 6, 7, 8, 9, 10, 11, 12, 13, 14, 15 or 16, 17, 18, 19, 20 or 21 antibiotic drugs is determined.

[0119] According to certain embodiments of the first and/or second aspect of the invention, a detected mutation is a mutation leading to an altered amino acid sequence in a polypeptide derived from a respective gene in which the detected mutation is located. According to this aspect, the detected mutation thus leads to a truncated version of the polypeptide (wherein a new stop codon is created by the mutation) or a mutated version of the polypeptide having an amino acid exchange at the respective position.

[0120] According to certain embodiments of the first and/or second aspect of the invention, determining the nucleic acid sequence information or the presence of a mutation comprises determining a partial sequence or an entire sequence of the at least two genes.

[0121] According to certain embodiments of the first and/or second aspect of the invention, determining the nucleic acid sequence information or the presence of a mutation comprises determining a partial or entire sequence of the genome of the Salmonella species, wherein said partial or entire sequence of the genome comprises at least a partial sequence of said at least two genes.

[0122] According to certain embodiments of the first and/or second aspect of the invention, determining the nucleic acid sequence information or the presence of a mutation comprises using a next generation sequencing or high throughput sequencing method. According to preferred embodiments of the first and/or second aspect of the invention, a partial or entire genome sequence of the bacterial organism of Salmonella species is determined by using a next generation sequencing or high throughput sequencing method.

[0123] In a further, third aspect, the present invention relates to a method of determining an antimicrobial drug, e.g. antibiotic, resistance profile for bacterial microorganisms of Salmonella species, comprising:

obtaining or providing a first data set of gene sequences of a plurality of clinical isolates of Salmonella species;
providing a second data set of antimicrobial drug, e.g. antibiotic, resistance of the plurality of clinical isolates of Salmonella species;
aligning the gene sequences of the first data set to at least one, preferably one, reference genome of Salmonella, and/or assembling the gene sequence of the first data set, at least in part;
analyzing the gene sequences of the first data set for genetic variants to obtain a third data set of genetic variants; correlating the third data set with the second data set and statistically analyzing the correlation; and
determining the genetic sites in the genome of Salmonella associated with antimicrobial drug, e.g. antibiotic, resistance.

[0124] The different steps can be carried out as described with regard to the method of the first aspect of the present invention.

[0125] When referring to the second data set, wherein the second data set e.g. comprises, respectively is, a set of antimicrobial drug, e.g. antibiotic, resistances of a plurality of clinical isolates, this can, within the scope of the invention, also refer to a self-learning data base that, whenever a new sample is analyzed, can take this sample into the second data set and thus expand its data base. The second data set thus does not have to be static and can be expanded, either by external input or by incorporating new data due to self-learning. This is, however, not restricted to the third aspect of the invention, but applies to other aspects of the invention that refer to a second data set, which does not necessarily have to refer to antimicrobial drug resistance.

[0126] The same applies, where applicable, to the first data set, e.g. in the third aspect.

[0127] According to certain embodiments, statistical analysis in the present methods is carried out using Fisher's test with p<10⁻⁶, preferably p<10⁻⁹, particularly p<10⁻¹⁰.

[0128] The method of the third aspect of the present invention, as well as related methods, e.g. according to the 7^{th} and 10^{th} aspect, can, according to certain embodiments, comprise correlating different genetic sites to each other, e.g. in at least two, three, four, five, six, seven, eight, nine or ten genes. This way even higher statistical significance can be achieved.

[0129] According to certain embodiments of the method of the third aspect and related methods—as above, the second data set is provided by culturing the clinical isolates of Salmonella species on agar plates provided with antimicrobial drugs, e.g. antibiotics, at different concentrations and the second data is obtained by taking the minimal concentration of the plates that inhibits growth of the respective Salmonella species.

[0130] According to certain embodiments of the method of the third aspect and related methods, the antibiotic is at least one selected from the group of β-lactams, β-lactam inhibitors, quinolines and derivatives thereof, aminoglycosides, tetracyclines, and folate synthesis inhibitors, preferably Amoxicillin/K Clavulanate, Ampicillin, Aztreonam, Cefazolin, Cefepime, Cefotaxime, Ceftazidime, Ceftriaxone, Cefuroxime, Cephalothin, Ciprofloxacin, Ertapenem, Gentamicin, Imipenem, Levofloxacin, Meropenem, Piperacillin/Tazobactam, Ampicillin/Sulbactam, Tetracycline, Tobramycin, and Trimethoprim/Sulfamethoxazole.

[0131] According to certain embodiments of the method of the third aspect and related methods, the gene sequences in the third data set are comprised in at least one gene from the group of genes consisting of recN, hemH, UMN798_3428, metE, yijD, UMN798_4831, UMN798_1939, copS, UMN798_0628, UMN798_4878, leuB, recF, emrA, glyQ, dcp, thiH, UMN798_1612, UMN798_2909, UMN798_1680, UMN798_4073, yjbC, nadB, UMN798_3160, hutU, envC, UMN798_3889, UMN798_1629, bcfB, degQ, UMN798_1331, trg, uvrC, polB, hpcD, UMN798_1628, UMN798_1701, glgS, plsB, yjcC, feoB, misL, dxr, hemF, rnfG, yhjB, UMN798_1163, UMN798_0394, alkA, nhaA, and lspA, or from the genes listed in Table 5, preferably Table 5a.

[0132] According to certain embodiments of the method of the third aspect and related methods, the genetic sites in the genome of Salmonella associated with antimicrobial drug, e.g. antibiotic, resistance are at least comprised in one gene from the group of genes consisting of recN, hemH, UMN798_3428, metE, yijD, UMN798_4831, UMN798_1939, copS, UMN798_0628, UMN798_4878, leuB, recF, emrA, glyQ, dcp, thiH, UMN798_1612, UMN798_2909, UMN798_1680, UMN798_4073, yjbC, nadB, UMN798_3160, hutU, envC, UMN798_3889, UMN798_1629, bcfB, degQ, UMN798_1331, trg, uvrC, polB, hpcD, UMN798_1628, UMN798_1701, glgS, plsB, yjcC, feoB, misL, dxr, hemF, rnfG, yhjB, UMN798_1163, UMN798_0394, alkA, nhaA, and lspA.

[0133] According to certain embodiments of the method of the third aspect and related methods, the genetic variant has a point mutation, an insertion and or deletion of up to four bases, and/or a frameshift mutation.

[0134] A fourth aspect of the present invention relates to a method of determining an antimicrobial drug, e.g. antibiotic, resistance profile for a bacterial microorganism belonging to the species Salmonella comprising the steps of

a) obtaining or providing a sample containing or suspected of containing the bacterial microorganism;
b) determining the presence of a mutation in at least one gene of the bacterial microorganism as determined by the method of the third aspect of the invention;
wherein the presence of a mutation is indicative of a resistance to an antimicrobial drug, e.g. antibiotic, drug.

[0135] Steps a) and b) can herein be carried out as described with regard to the first aspect, as well as for the following aspects of the invention.

[0136] With this method, any mutations in the genome of Salmonella species correlated with antimicrobial drug, e.g. antibiotic, resistance can be determined and a thorough antimicrobial drug, e.g. antibiotic, resistance profile can be established.

[0137] A simple read out concept for a diagnostic test as described in this aspect is shown schematically in FIG. 1.

[0138] According to FIG. 1, a sample 1, e.g. blood from a patient, is used for molecular testing 2, e.g. using next generation sequencing (NGS), and then a molecular fingerprint 3 is taken, e.g. in case of NGS a sequence of selected genomic/plasmid regions or the whole genome is assembled. This is then compared to a reference library 4, i.e. selected sequences or the whole sequence are/is compared to one or more reference sequences, and mutations (SNPs, sequence-gene additions/deletions, etc.) are correlated with susceptibility/reference profile of reference strains in the reference library. The reference library 4 herein contains many genomes and is different from a reference genome. Then the result 5 is reported comprising ID (pathogen identification), i.e. a list of all (pathogenic) species identified in the sample, and AST (antimicrobial susceptibility testing), i.e. a list including a susceptibility/resistance profile for all species listed

[0139] A fifth aspect of the present invention relates to a diagnostic method of determining an infection of a patient with Salmonella species potentially resistant to antimicrobial drug treatment, which also can be described as method of determining an antimicrobial drug, e.g. antibiotic, resistant Salmonella infection in a patient, comprising the steps of:

a) obtaining or providing a sample containing or suspected of containing a bacterial microorganism belonging to the species Salmonella from the patient;
b) determining the presence of at least one mutation in at least one gene of the bacterial microorganism belonging to the species Salmonella as determined by the method of the third aspect of the present invention, wherein the presence of said at least one mutation is indicative of an antimicrobial drug, e.g. antibiotic, resistant Salmonella infection in said patient.

[0140] Again, steps a) and b) can herein be carried out as described with regard to the first aspect of the present invention.

[0141] According to this aspect, a Salmonella infection in a patient can be determined using sequencing methods as well as a resistance to antimicrobial drugs, e.g. antibiotics, of the Salmonella species be determined in a short amount of time compared to the conventional methods.

[0142] In a sixth aspect the present invention relates to a method of selecting a treatment of a patient suffering from an infection with a potentially resistant Salmonella strain, e.g. an antimicrobial drug, e.g. antibiotic, resistant Salmonella infection, comprising the steps of:

a) obtaining or providing a sample containing or suspected of containing a bacterial microorganism belonging to the species Salmonella from the patient;
b) determining the presence of at least one mutation in at least one gene of the bacterial microorganism belonging to the species Salmonella as determined by the method of the third aspect of the invention, wherein the presence of said at least one mutation is indicative of a resistance to one or more antimicrobial, e.g. antibiotic, drugs;
c) identifying said at least one or more antimicrobial, e.g. antibiotic, drugs; and
d) selecting one or more antimicrobial, e.g. antibiotic, drugs different from the ones identified in step c) and being suitable for the treatment of a Salmonella infection.

[0143] This method can be carried out similarly to the second aspect of the invention and enables a fast was to select a suitable treatment with antibiotics for any infection with an unknown Salmonella species.

[0144] A seventh aspect of the present invention relates to a method of acquiring, respectively determining, an antimicrobial drug, e.g. antibiotic, resistance profile for a bacterial microorganism of Salmonella species, comprising:

obtaining or providing a first data set of gene sequences of a clinical isolate of Salmonella species;
providing a second data set of antimicrobial drug, e.g. antibiotic, resistance of a plurality of clinical isolates of Salmonella species;
aligning the gene sequences of the first data set to at least one, preferably one, reference genome of Salmonella, and/or assembling the gene sequence of the first data set, at least in part;
analyzing the gene sequences of the first data set for genetic variants to obtain a third data set of genetic variants of the first data set;
correlating the third data set with the second data set and statistically analyzing the correlation; and
determining the genetic sites in the genome of Salmonella of the first data set associated with antimicrobial drug, e.g. antibiotic, resistance.

[0145] With this method, antimicrobial drug, e.g. antibiotic, resistances in an unknown isolate of Salmonella can be determined.

[0146] According to certain embodiments, the reference genome of Salmonella is NC_017046 as annotated at the NCBI. According to certain embodiments, statistical analysis in the present methods is carried out using Fisher's test with p<10⁻⁶, preferably p<10⁻⁹, particularly p<10⁻¹⁰. Also, according to certain embodiments, the method further comprises correlating different genetic sites to each other, e.g. in at least two, three, four, five, six, seven, eight, nine or ten genes.

[0147] An eighth aspect of the present invention relates to a computer program product comprising computer executable instructions which, when executed, perform a method according to the third, fourth, fifth, sixth or seventh aspect of the present invention.

[0148] In certain embodiments the computer program product is one on which program commands or program codes of a computer program for executing said method are stored. According to certain embodiments the computer program product is a storage medium. The same applies to the computer program products of the aspects mentioned afterwards, i.e. the eleventh aspect of the present invention. As noted above, the computer program products of the present invention can be self-learning, e.g. with respect to the first and second data sets.

[0149] In order to obtain the best possible information from the highly complex genetic data and develop an optimum model for diagnostic and therapeutical uses as well as the methods of the present invention—which can be applied stably in clinical routine—a thorough in silico analysis can be necessary. The proposed principle is based on a combination of different approaches, e.g. alignment with at least one, preferably more reference genomes and/or assembly of the genome and correlation of mutations found in every sample, e.g. from each patient, with all references and drugs, e.g. antibiotics, and search for mutations which occur in several drug and several strains.

[0150] Using the above steps a list of mutations as well of genes is generated. These can be stored in databases and statistical models can be derived from the databases. The statistical models can be based on at least one or more mutations at least one or more genes. Statistical models that can be trained can be combined from mutations and genes. Examples of algorithms that can produce such models are association Rules, Support Vector Machines, Decision Trees, Decision Forests, Discriminant-Analysis, Cluster-Methods, and many more.

[0151] The goal of the training is to allow a reproducible, standardized application during routine procedures.

[0152] For this, for example, a genome or parts of the genome of a microorganism can be sequenced from a patient to be diagnosed. Afterwards, core characteristics can be derived from the sequence data which can be used to predict resistance. These are the points in the database used for the final model, i.e. at least one mutation or at least one gene, but also combinations of mutations, etc.

[0153] The corresponding characteristics can be used as input for the statistical model and thus enable a prognosis for new patients. Not only the information regarding all resistances of all microorganisms, e.g. of Salmonella species, against all drugs, e.g. antibiotics, can be integrated in a computer decision support tool, but also corresponding directives (e.g. EUCAST) so that only treatment proposals are made that are in line with the directives.

[0154] A ninth aspect of the present invention relates to the use of the computer program product according to the eighth aspect for acquiring an antimicrobial drug, e.g. antibiotic, resistance profile for bacterial microorganisms of Salmonella species or in a method of the third aspect of the invention.

[0155] In a tenth aspect a method of selecting a treatment of a patient having an infection with a bacterial microorganism of Salmonella species, comprising:

obtaining or providing a first data set comprising a gene sequence of at least one clinical isolate of the bacterial microorganism from the patient;
providing a second data set of antimicrobial drug, e.g. antibiotic, resistance of a plurality of clinical isolates of the bacterial microorganism;
aligning the gene sequences of the first data set to at least one, preferably one, reference genome of the bacterial microorganism, and/or assembling the gene sequence of the first data set, at least in part;
analyzing the gene sequences of the first data set for genetic variants to obtain a third data set of genetic variants of the first data set;
correlating the third data set with the second data set of antimicrobial drug, e.g. antibiotic, resistance of a plurality of clinical isolates of the bacterial microorganism and statistically analyzing the correlation;
determining the genetic sites in the genome of the clinical isolate of the bacterial microorganism of the first data set associated with antimicrobial drug, e.g. antibiotic, resistance; and
selecting a treatment of the patient with one or more antimicrobial, e.g. antibiotic, drugs different from the ones identified in the determination of the genetic sites associated with antimicrobial drug, e.g. antibiotic, resistance is disclosed.

[0156] Again, the steps can be carried out as similar steps before. In this method, as well as similar ones, no aligning is necessary, as the unknown sample can be directly correlated, after the genome or genome sequences are produced, with the second data set and thus mutations and antimicrobial drug, e.g. antibiotic, resistances can be determined. The first data set can be assembled, for example, using known techniques.

[0157] According to certain embodiments, statistical analysis in the present method is carried out using Fisher's test with p<10-6, preferably p<10-9, particularly p<10-10. Also, according to certain embodiments, the method further comprises correlating different genetic sites to each other.

[0158] An eleventh aspect of the present invention is directed to a computer program product comprising computer executable instructions which, when executed, perform a method according to the tenth aspect.

[0159] According to a twelfth aspect of the present invention, a diagnostic method of determining an infection of a patient with Salmonella species potentially resistant to antimicrobial drug treatment, which can also be described as a method of determining an antimicrobial drug, e.g. antibiotic, resistant Salmonella infection of a patient is disclosed, comprising the steps of:

a) obtaining or providing a sample containing or suspected of containing at least one Salmonella species from the patient;
b) determining the presence of at least one mutation in at least two genes from the group of genes listed in Table 5, preferably Table 5a, wherein the presence of said at least two mutations is indicative of an antimicrobial drug, e.g. antibiotic, resistant Salmonella infection in said patient.

[0160] A thirteenth aspect of the invention discloses a method of selecting a treatment of a patient suffering from an antimicrobial drug, e.g. antibiotic, resistant Salmonella infection, comprising the steps of:

a) obtaining or providing a sample containing or suspected of containing at least one Salmonella species from the patient;
b) determining the presence of at least one mutation in at least two genes from the group of genes listed in Table 5, preferably at least two genes from the group of genes listed in Table 5a, wherein the presence of said at least two mutations is indicative of a resistance to one or more antimicrobial, e.g. antibiotic, drugs;
c) identifying said at least one or more antimicrobial, e.g. antibiotic, drugs; and
d) selecting one or more antimicrobial, e.g. antibiotic, drugs different from the ones identified in step c) and being suitable for the treatment of a Salmonella infection.

[0161] Again, the steps can be carried out as in similar methods before, e.g. as in the first and second aspect of the invention. In the twelfth and thirteenth aspect of the invention, all classes of antibiotics considered in the present method are covered.

TABLE 5
List of genes

| | | | | |
|---|---|---|---|---|
| recN | hemH | UMN798_3428 | metE | yijD |
| UMN798_4831 | UMN798_1939 | copS | UMN798_0628 | UMN798_4878 |
| leuB | recF | emrA | glyQ | dcp |
| thiH | UMN798_1612 | UMN798_2909 | UMN798_1680 | UMN798_4073 |
| yjbC | nadB | UMN798_3160 | hutU | envC |
| UMN798_3889 | UMN798_1629 | bcfB | degQ | UMN798_1331 |
| trg | uvrC | polB | hpcD | UMN798_1628 |
| UMN798_1701 | glgS | plsB | yjcC | feoB |
| misL | dxr | hemF | rnfG | yhjB |
| UMN798_1163 | UMN798_0394 | alkA | nhaA | lspA |
| UMN798_3890 | ycbB | malS | dmsC | UMN798_0020 |
| UMN798_1618 | UMN798_1617 | UMN798_4717 | UMN798_0389 | kdpD |
| hisB | UMN798_2727 | UMN798_3918 | UMN798_4753 | UMN798_4936 |
| yhdM | UMN798_0631 | UMN798_1337 | UMN798_1550 | iroE |
| pheT | hofC | gyrA | torS | UMN798_1114 |
| UMN798_2482 | rseB | hycC | ttk | cpdB |
| UMN798_4882 | rob | creA | UMN798_2202 | dppA |
| adiY | UMN798_0653 | gmm | UMN798_0179 | UMN798_3553 |
| UMN798_4061 | hrpB | UMN798_0975 | gcvP | UMN798_0654 |
| pnp | ytfF | UMN798_1632 | fhuD | |

[0162] Herein, the genes in Table 5 are the following: recN, hemH, UMN798_3428, metE, yijD, UMN798_4831, UMN798_1939, copS, UMN798_0628, UMN798_4878, leuB, recF, emrA, glyQ, dcp, thiH, UMN798_1612, UMN798_2909, UMN798_1680, UMN798_4073, yjbC, nadB, UMN798_3160, hutU, envC, UMN798_3889, UMN798_1629, bcfB, degQ, UMN798_1331, trg, uvrC, polB, hpcD, UMN798_1628, UMN798_1701, glgS, plsB, yjcC, feoB, misL, dxr, hemF, rnfG, yhjB, UMN798_1163, UMN798_0394, alkA, nhaA, lspA, UMN798_3890, ycbB, malS, dmsC, UMN798_0020, UMN798_1618, UMN798_1617, UMN798_4717, UMN798_0389, kdpD, hisB, UMN798_2727, UMN798_3918, UMN798_4753, UMN798_4936, yhdM, UMN798_0631, UMN798_1337, UMN798_1550, iroE, pheT, hofC, gyrA, torS, UMN798_1114, UMN798_2482, rseB, hycC, ttk, cpdB, UMN798_4882, rob, creA, UMN798_2202, dppA, adiY, UMN798_0653, gmm, UMN798_0179, UMN798_3553, UMN798_4061, hrpB, UMN798_0975, gcvP, UMN798_0654, pnp, ytfF, UMN798_1632, and fhuD.

TABLE 5a
List of genes

| | | | | |
|---|---|---|---|---|
| recN | hemH | UMN798_3428 | metE | yijD |
| UMN798_4831 | UMN798_1939 | copS | UMN798_0628 | UMN798_4878 |
| leuB | recF | emrA | glyQ | dcp |
| thiH | UMN798_1612 | UMN798_2909 | UMN798_1680 | UMN798_4073 |
| yjbC | nadB | UMN798_3160 | hutU | envC |
| UMN798_3889 | UMN798_1629 | bcfB | degQ | UMN798_1331 |
| trg | uvrC | polB | hpcD | UMN798_1628 |
| UMN798_1701 | glgS | plsB | yjcC | feoB |
| misL | dxr | hemF | rnfG | yhjB |
| UMN798_1163 | UMN798_0394 | alkA | nhaA | lspA |
| UMN798_3890 | ycbB | malS | dmsC | UMN798_0020 |
| UMN798_1618 | UMN798_1617 | UMN798_4717 | UMN798_0389 | kdpD |
| hisB | UMN798_2727 | UMN798_3918 | UMN798_4753 | UMN798_4936 |
| yhdM | UMN798_0631 | UMN798_1337 | UMN798_1550 | iroE |
| pheT | hofC | fhuD | torS | UMN798_1114 |
| UMN798_2482 | rseB | hycC | ttk | cpdB |
| UMN798_4882 | rob | creA | UMN798_2202 | dppA |
| adiY | UMN798_0653 | gmm | UMN798_0179 | UMN798_3553 |
| UMN798_4061 | hrpB | UMN798_0975 | gcvP | UMN798_0654 |
| pnp | ytfF | UMN798_1632 | | |

[0163] Herein, the genes in Table 5a are the following: recN, hemH, UMN798_3428, metE, yijD, UMN798_4831, UMN798_1939, copS, UMN798_0628, UMN798_4878, leuB, recF, emrA, glyQ, dcp, thiH, UMN798_1612, UMN798_2909, UMN798_1680, UMN798_4073, yjbC, nadB, UMN798_3160, hutU, envC, UMN798_3889, UMN798_1629, bcfB, degQ, UMN798_1331, trg, uvrC, polB, hpcD, UMN798_1628, UMN798_1701, glgS, plsB, yjcC, feoB, misL, dxr, hemF, rnfG, yhjB, UMN798_1163, UMN798_0394, alkA, nhaA, lspA, UMN798_3890, ycbB, malS, dmsC, UMN798_0020, UMN798_1618, UMN798_1617, UMN798_4717, UMN798_0389, kdpD, hisB, UMN798_2727, UMN798_3918, UMN798_4753, UMN798_4936, yhdM, UMN798_0631, UMN798_1337, UMN798_1550, iroE, pheT, hofC, torS, UMN798_1114, UMN798_2482, rseB, hycC, ttk, cpdB, UMN798_4882, rob, creA, UMN798_2202, dppA, adiY, UMN798_0653, gmm, UMN798_0179, UMN798_3553, UMN798_4061, hrpB, UMN798_0975, gcvP, UMN798_0654, pnp, ytfF, UMN798_1632, and fhuD.

[0164] According to certain embodiments, mutations in at least two, three, four, five, six, seven, eight, nine or ten genes are determined in any of the methods of the present invention, e.g. in at least two genes or in at least three genes. Instead of testing only single genes or mutants, a combination of several variant positions can improve the prediction accuracy and further reduce false positive findings that are influenced by other factors. Therefore, it is in particular preferred to determine the presence of a mutation in 2, 3, 4, 5, 6, 7, 8 or 9 (or more) genes selected from Table 5, preferably Table 5a.

[0165] Further, according to certain embodiments, the reference genome of Salmonella is again NC_017046 as annotated at the NCBI. According to certain embodiments, statistical analysis in the present methods is carried out using Fisher's test with p<10⁻⁶, preferably p<10⁻⁹, particularly p<10⁻¹⁰. Also, according to certain embodiments, the method further comprises correlating different genetic sites to each other. Also the other aspects of the embodiments of the first and second aspect of the invention apply.

[0166] According to certain embodiments of the method of the twelfth and/or thirteenth aspect of the present invention, as well as also of the eighteenth aspect of the present invention, the antimicrobial drug is an antibiotic. According to certain embodiments, the antibiotic is a lactam antibiotic and a mutation in at least one of the genes listed in Table 6 is detected, or a mutation in at least one of the positions (denoted POS in the table) listed in Table 6.

TABLE 6
List for lactam antibiotics (7 antibiotics)

| | | | p-value | genbank protein |
|---|---|---|---|---|
| gene name | POS | antibiotic | (FDR) | accession number |
| UMN798_4878 | 4779417 | CF; TE; CFZ; CRM; P/T; | 3.07597E−46 | YP_005399754.1 |
| | | TO; AM; A/S; AUG | | |
| emrA | 2983118 | CF; TE; CFZ; CRM; P/T; | 7.30419E−45 | YP_005398183.1 |
| | | TO; AM; A/S; AUG | | |
| dcp | 1548464 | CF; TE; CFZ; CRM; P/T; | 2.06883E−43 | YP_005396900.1 |
| | | TO; AM; A/S; AUG | | |
| UMN798_1612 | 1574737 | CF; TE; CFZ; CRM; P/T; | 2.20543E−42 | YP_005396930.1 |
| | | TO; AM; A/S; AUG | | |
| UMN798_3889 | 3772654 | CF; TE; CFZ; CRM; P/T; | 1.08166E−40 | YP_005398910.1 |
| | | TO; AM; A/S; AUG | | |
| UMN798_1331 | 1313897 | CF; TE; CFZ; CRM; P/T; | 2.91148E−40 | YP_005396683.1 |
| | | TO; AM; A/S; AUG | | |
| UMN798_3890 | 3774253 | CF; TE; CFZ; CRM; P/T; | 3.75244E−39 | YP_005398911.1 |
| | | TO; AM; A/S; AUG | | |
| ycbB | 1042088 | CF; TE; CFZ; CRM; P/T; | 2.20447E−38 | YP_005396423.1 |
| | | TO; AM; A/S; AUG | | |
| malS | 3872045 | CF; TE; CFZ; CRM; P/T; | 2.52527E−37 | YP_005398986.1 |
| | | TO; AM; A/S; AUG | | |
| dmsC | 1530443 | CF; TE; CFZ; CRM; P/T; | 1.22527E−35 | YP_005396885.1 |
| | | AM; A/S; AUG | | |
| UMN798_0020 | 20803 | CF; TE; CFZ; CRM; P/T; | 1.36107E−35 | YP_005395531.1 |
| | | TO; AM; A/S; AUG | | |
| UMN798_1618 | 1581225 | CF; CFZ; CRM; P/T; TO; | 2.96558E−35 | YP_005396935.1 |
| | | AM; A/S; AUG | | |
| UMN798_1617 | 1580429 | CF; CFZ; CRM; P/T; TO; | 3.49041E−35 | YP_005396934.1 |
| | | AM; A/S; AUG | | |
| UMN798_4717 | 4617911 | CF; CFZ; CRM; P/T; TO; | 1.10141E−34 | YP_005399615.1 |
| | | AM; A/S; AUG | | |
| UMN798_0389 | 401518 | CF; CFZ; CRM; P/T; TO; | 1.58664E−34 | YP_005395855.1 |
| | | AM; A/S; AUG | | |

FDR: determined according to FDR (Benjamini Hochberg) method (Benjamini Hochberg, 1995)

[0167] According to certain embodiments of the method of the twelfth and/or thirteenth aspect of the present invention, as well as also of the eighteenth aspect of the present invention, the antibiotic is at least one of CF, CFZ, CRM, P/T, AM, A/S, and AUG and a mutation in at least one of the genes of UMN798_4878, emrA, dcp, UMN798_1612, UMN798_3889, UMN798_1331, UMN798_3890, ycbB, malS, dmsC, UMN798_0020, UMN798_1618, UMN798_1617, UMN798_4717, UMN798_0389 is detected, or a mutation in at least one of the positions of 4779417, 2983118, 1548464, 1574737, 3772654, 1313897, 3774253, 1042088, 3872045, 1530443, 20803, 1581225, 1580429, 4617911, 401518.

[0168] According to certain embodiments of the method of the twelfth and/or thirteenth aspect of the present invention, as well as also of the eighteenth aspect of the present invention, the antibiotic is a quinolone antibiotic and a mutation in at least one of the genes listed in Table 7 is detected, e.g. in torS, or a mutation in at least one of the positions (denoted POS in the table) listed in Table 7, e.g. position 4048606.

TABLE 7
List for quinolone antibiotics (all 2)

| | | | p-value | genbank protein |
|---|---|---|---|---|
| gene name | POS | antibiotic | (FDR) | accession number |
| gyrA | 2373180 | CP; LVX | 3.47827E−22 | YP_005397662.1 |
| gyrA | 2373169 | CP | 2.22208E−21 | YP_005397662.1 |
| torS | 4048606 | TE; CP | 1.09183E−10 | YP_005399143.1 |

[0169] According to certain embodiments of the method of the twelfth and/or thirteenth aspect of the present invention, as well as also of the eighteenth aspect of the present invention, the antibiotic is at least one of CP and LVX and a mutation in gyrA is detected, or a mutation in position 2373180.

[0170] According to certain embodiments of the method of the twelfth and/or thirteenth aspect of the present invention, as well as also of the eighteenth aspect of the present invention, the antibiotic is CP and a mutation in at least one of the genes of gyrA, torS, e.g. torS, is detected, or a mutation in at least one of the positions of 2373169, 4048606, e.g. 4048606.

[0171] According to certain embodiments of the method of the twelfth and/or thirteenth aspect of the present invention, as well as also of the eighteenth aspect of the present invention, the antibiotic is an aminoglycoside antibiotic and a mutation in at least one of the genes listed in Table 8 is detected, or a mutation in at least one of the positions (denoted POS in the table) listed in Table 8.

TABLE 8
List of aminoglycoside antibiotics

| | | | p-value | genbank protein |
|---|---|---|---|---|
| gene name | POS | antibiotic | (FDR) | accession number |
| UMN798_2909 | 2840330 | TE; GM; A/S; CRM; | 3.28817E−42 | YP_005398061.1 |
| | | P/T; TO; AM; AUG | | |
| bcfB | 25574 | TE; GM; A/S; CRM; | 2.23532E−40 | YP_005395534.1 |
| | | P/T; TO; AM; AUG | | |
| degQ | 3536122 | GM; A/S; CRM; P/T; | 2.63263E−40 | YP_005398691.1 |
| | | TO; AM; AUG | | |
| polB | 115342 | TE; GM; A/S; CRM; | 7.82734E−40 | YP_005395610.1 |
| | | P/T; TO; AM; AUG | | |
| hpcD | 1148509 | TE; GM; A/S; CRM; | 8.03033E−40 | YP_005396519.1 |
| | | P/T; TO; AM; AUG | | |
| glgS | 3379140 | TE; GM; A/S; CRM; | 9.6031E−40 | YP_005398544.1 |
| | | P/T; TO; AM; AUG | | |
| plsB | 4478134 | TE; GM; A/S; CRM; | 9.6031E−40 | YP_005399505.1 |
| | | P/T; TO; AM; AUG | | |
| feoB | 3686566 | TE; GM; A/S; CRM; | 1.3875E−39 | YP_005398837.1 |
| | | P/T; TO; AM; AUG | | |
| rnfG | 1487086 | TE; GM; A/S; CRM; | 1.71803E−39 | YP_005396848.1 |
| | | P/T; TO; AM; AUG | | |
| UMN798_3428 | 3335426 | TE; GM; A/S; CRM; | 1.71803E−39 | YP_005398501.1 |
| | | P/T; TO; AM; AUG | | |
| yhjB | 3799879 | TE; GM; A/S; CRM; | 1.71803E−39 | YP_005398931.1 |
| | | P/T; TO; AM; AUG | | |
| UMN798_1163 | 1163470 | TE; GM; A/S; CRM; | 2.82119E−39 | YP_005396535.1 |
| | | P/T; TO; AM; AUG | | |
| alkA | 2208848 | TE; GM; A/S; CRM; | 3.17482E−39 | YP_005397522.1 |
| | | P/T; TO; AM; AUG | | |
| nhaA | 46695 | TE; GM; A/S; CRM; | 3.75244E−39 | YP_005395552.1 |
| | | P/T; TO; AM; AUG | | |
| lspA | 56998 | TE; GM; A/S; CRM; | 3.75244E−39 | YP_005395561.1 |
| | | P/T; TO; AM; AUG | | |

[0172] According to certain embodiments of the method of the twelfth and/or thirteenth aspect of the present invention, as well as also of the eighteenth aspect of the present invention, the antibiotic is at least one of TO and GM and a mutation in at least one of the genes of UMN798_2909, bcfB, degQ, polB, hpcD, glgS, plsB, feoB, rnfG, UMN798_3428, yhjB, UMN798_1163, alkA, nhaA, lspA is detected, or a mutation in at least one of the positions of 2840330, 25574, 3536122, 115342, 1148509, 3379140, 4478134, 3686566, 1487086, 3335426, 3799879, 1163470, 2208848, 46695, 56998.

[0173] According to certain embodiments of the method of the twelfth and/or thirteenth aspect of the present invention, as well as also of the eighteenth aspect of the present invention, the antibiotic is a polyketide antibiotic and a mutation in at least one of the genes listed in Table 9 is detected, or a mutation in at least one of the positions (denoted POS in the table) listed in Table 9.

[0174] According to certain embodiments of the method of the twelfth and/or thirteenth aspect of the present invention, as well as also of the eighteenth aspect of the present invention, the antibiotic is TE and a mutation in at least one of the genes of recN, hemH, UMN798_3428, metE, yijD, UMN798_4831, UMN798_1939, copS, UMN798_0628, UMN798_4878, leuB, recF, emrA, glyQ, dcp, recN, hemH is detected, or a mutation in at least one of the positions of 2833888, 546961, 3334479, 4191057, 4366486, 4724403, 1895588, 1139812, 637461, 4779417, 131219, 4062015, 2983118, 3861998, 1548464, 2833888, 546961.

TABLE 9
List of polyketides, preferably tetracycline

| | | | p-value | genbank protein |
|---|---|---|---|---|
| gene name | POS | antibiotic | (FDR) | accession number |
| recN | 2833888 | CF; TE; A/S; CRM; P/T; | 1.03434E−49 | YP_005398056.1 |
| | | TO; AM; AUG | | |
| hemH | 546961 | CF; TE; A/S; CRM; P/T; | 2.16472E−49 | YP_005395984.1 |
| | | TO; AM; AUG | | |
| UMN798_3428 | 3334479 | CF; TE; A/S; CRM; P/T; | 2.16472E−49 | YP_005398501.1 |
| | | TO; AM; AUG | | |
| metE | 4191057 | CF; TE; A/S; CRM; P/T; | 2.16472E−49 | YP_005399262.1 |
| | | TO; AM; AUG | | |
| yijD | 4366486 | CF; TE; A/S; CRM; P/T; | 2.16472E−49 | YP_005399415.1 |
| | | TO; AM; AUG | | |
| UMN798_4831 | 4724403 | CF; TE; A/S; CRM; P/T; | 2.16472E−49 | YP_005399714.1 |
| | | TO; AM; AUG | | |
| UMN798_1939 | 1895588 | CF; TE; A/S; CRM; P/T; | 3.03206E−49 | YP_005397219.1 |
| | | TO; AM; AUG | | |
| copS | 1139812 | CF; TE; A/S; CRM; P/T; | 1.30591E−48 | YP_005396510.1 |
| | | TO; AM; AUG | | |
| UMN798_0628 | 637461 | CF; TE; A/S; CRM; P/T; | 6.68901E−47 | YP_005396068.1 |
| | | TO; AM; AUG | | |
| UMN798_4878 | 4779417 | CF; TE; CFZ; CRM; P/T; | 3.07597E−46 | YP_005399754.1 |
| | | TO; AM; A/S; AUG | | |
| leuB | 131219 | CF; TE; A/S; CRM; P/T; | 3.79108E−45 | YP_005395624.1 |
| | | TO; AM; AUG | | |
| recF | 4062015 | CF; TE; A/S; CRM; P/T; | 5.78617E−45 | YP_005399154.1 |
| | | TO; AM; AUG | | |
| emrA | 2983118 | CF; TE; CFZ; CRM; P/T; | 7.30419E−45 | YP_005398183.1 |
| | | TO; AM; A/S; AUG | | |
| glyQ | 3861998 | CF; TE; A/S; CRM; P/T; | 1.47298E−44 | YP_005398978.1 |
| | | TO; AM; AUG | | |
| dcp | 1548464 | CF; TE; CFZ; CRM; P/T; | 2.06883E−43 | YP_005396900.1 |
| | | TO; AM; A/S; AUG | | |

[0175] A fourteenth aspect of the present invention is directed to a diagnostic method of determining an infection of a patient with Salmonella species potentially resistant to antimicrobial drug treatment, which can also be described as method of determining an antimicrobial drug, e.g. antibiotic, resistant Salmonella infection of a patient, comprising the steps of:

a) obtaining or providing a sample containing or suspected of containing at least one Salmonella species from the patient;
b) determining the presence of at least one mutation in at least one gene from the group of genes consisting of recN, hemH, UMN798_3428, metE, yijD, UMN798_4831, UMN798_1939, copS, UMN798_0628, UMN798_4878, leuB, recF, glyQ, dcp, thiH, UMN798_1612, UMN798_2909, UMN798_1680, UMN798_4073, yjbC, UMN798_3160, hutU, envC, UMN798_3889, UMN798_1629, bcfB, degQ, UMN798_1331, trg, uvrC, polB, hpcD, UMN798_1628, UMN798_1701, glgS, plsB, yjcC, feoB, misL, dxr, hemF, rnfG, yhjB, UMN798_1163, UMN798_0394, alkA, nhaA, and lspA, preferably from the group of genes consisting of hemH, UMN798_3428, UMN798_4831, UMN798_1939, UMN798_0628, UMN798_4878, leuB, glyQ, dcp, thiH, UMN798_1612, UMN798_2909, UMN798_1680, UMN798_4073, yjbC, UMN798_3160, UMN798_3889, UMN798_1629, bcfB, degQ, UMN798_1331, trg, hpcD, UMN798_1628, UMN798_1701, glgS, yjcC, misL, hemF, rnfG, UMN798_1163, UMN798_0394, and nhaA, wherein the presence of said at least one mutation is indicative of an antimicrobial drug, e.g. antibiotic, resistant Salmonella infection in said patient.

[0176] A fifteenth aspect of the present invention is directed to a method of selecting a treatment of a patient suffering from an antimicrobial drug, e.g. antibiotic, resistant Salmonella infection, comprising the steps of:

a) obtaining or providing a sample containing or suspected of containing at least one Salmonella species from the patient;
b) determining the presence of at least one mutation in at least one gene from the group of genes consisting of recN, hemH, UMN798_3428, metE, yijD, UMN798_4831, UMN798_1939, copS, UMN798_0628, UMN798_4878, leuB, recF, glyQ, dcp, thiH, UMN798_1612, UMN798_2909, UMN798_1680, UMN798_4073, yjbC, UMN798_3160, hutU, envC, UMN798_3889, UMN798_1629, bcfB, degQ, UMN798_1331, trg, uvrC, polB, hpcD, UMN798_1628, UMN798_1701, glgS, plsB, yjcC, feoB, misL, dxr, hemF, rnfG, yhjB, UMN798_1163, UMN798_0394, alkA, nhaA, and lspA, preferably from the group of genes consisting of hemH, UMN798_3428, UMN798_4831, UMN798_1939, UMN798_0628, UMN798_4878, leuB, glyQ, dcp, thiH, UMN798_1612, UMN798_2909, UMN798_1680, UMN798_4073, yjbC, UMN798_3160, UMN798_3889, UMN798_1629, bcfB, degQ, UMN798_1331, trg, hpcD, UMN798_1628, UMN798_1701, glgS, yjcC, misL, hemF, rnfG, UMN798_1163, UMN798_0394, and nhaA, wherein the presence of said at least one mutation is indicative of a resistance to one or more antimicrobial, e.g. antibiotic, drugs;
c) identifying said at least one or more antimicrobial, e.g. antibiotic, drugs; and
d) selecting one or more antimicrobial, e.g. antibiotic, drugs different from the ones identified in step c) and being suitable for the treatment of a Salmonella infection.

[0177] Again, in the fourteenth and the fifteenth aspect the steps correspond to those in the first or second aspect, although only a mutation in at least one gene is determined.

[0178] A sixteenth aspect of the present invention is directed to a method of treating a patient suffering from an antimicrobial drug, e.g. antibiotic, resistant Salmonella infection, comprising the steps of:

a) obtaining or providing a sample containing or suspected of containing at least one Salmonella species from the patient;
b) determining the presence of at least one mutation in at least one gene from the group of genes consisting of recN, hemH, UMN798_3428, metE, yijD, UMN798_4831, UMN798_1939, copS, UMN798_0628, UMN798_4878, leuB, recF, glyQ, dcp, thiH, UMN798_1612, UMN798_2909, UMN798_1680, UMN798_4073, yjbC, UMN798_3160, hutU, envC, UMN798_3889, UMN798_1629, bcfB, degQ, UMN798_1331, trg, uvrC, polB, hpcD, UMN798_1628, UMN798_1701, glgS, plsB, yjcC, feoB, misL, dxr, hemF, rnfG, yhjB, UMN798_1163, UMN798_0394, alkA, nhaA, and lspA, preferably from the group of genes consisting of hemH, UMN798_3428, UMN798_4831, UMN798_1939, UMN798_0628, UMN798_4878, leuB, glyQ, dcp, thiH, UMN798_1612, UMN798_2909, UMN798_1680, UMN798_4073, yjbC, UMN798_3160, UMN798_3889, UMN798_1629, bcfB, degQ, UMN798_1331, trg, hpcD, UMN798_1628, UMN798_1701, glgS, yjcC, misL, hemF, rnfG, UMN798_1163, UMN798_0394, and nhaA, wherein the presence of said at least one mutation is indicative of a resistance to one or more antimicrobial, e.g. antibiotic, drugs;
c) identifying said at least one or more antimicrobial, e.g. antibiotic, drugs;
d) selecting one or more antimicrobial, e.g. antibiotic, drugs different from the ones identified in step c) and being suitable for the treatment of a Salmonella infection; and
e) treating the patient with said one or more antimicrobial, e.g. antibiotic, drugs.

[0179] A seventeenth aspect of the present invention is directed to a method of treating a patient suffering from an antimicrobial drug, e.g. antibiotic, resistant Salmonella infection, comprising the steps of:

a) obtaining or providing a sample containing or suspected of containing at least one Salmonella species from the patient;
b) determining the presence of at least one mutation in at least two genes from the group of genes consisting of recN, hemH, UMN798_3428, metE, yijD, UMN798_4831, UMN798_1939, copS, UMN798_0628, UMN798_4878, leuB, recF, emrA, glyQ, dcp, thiH, UMN798_1612, UMN798_2909, UMN798_1680, UMN798_4073, yjbC, nadB, UMN798_3160, hutU, envC, UMN798_3889, UMN798_1629, bcfB, degQ, UMN798_1331, trg, uvrC, polB, hpcD, UMN798_1628, UMN798_1701, glgS, plsB, yjcC, feoB, misL, dxr, hemF, rnfG, yhjB, UMN798_1163, UMN798_0394, alkA, nhaA, and lspA, wherein the presence of said at least two mutations is indicative of a resistance to one or more antimicrobial, e.g. antibiotic, drugs;
c) identifying said at least one or more antimicrobial, e.g. antibiotic, drugs;
d) selecting one or more antimicrobial, e.g. antibiotic, drugs different from the ones identified in step c) and being suitable for the treatment of a Salmonella infection; and
e) treating the patient with said one or more antimicrobial, e.g. antibiotic, drugs.

[0180] An eighteenth aspect of the present invention is directed to a method of treating a patient suffering from an antimicrobial drug, e.g. antibiotic, resistant Salmonella infection, comprising the steps of:

a) obtaining or providing a sample containing or suspected of containing at least one Salmonella species from the patient;
b) determining the presence of at least one mutation in at least two genes from the group of genes listed in Table 5, preferably Table 5a, wherein the presence of said at least two mutations is indicative of a resistance to one or more antimicrobial, e.g. antibiotic, drugs;
c) identifying said at least one or more antimicrobial, e.g. antibiotic, drugs;
d) selecting one or more antimicrobial, e.g. antibiotic, drugs different from the ones identified in step c) and being suitable for the treatment of a Salmonella infection; and
e) treating the patient with said one or more antimicrobial, e.g. antibiotic, drugs.

[0181] A nineteenth aspect of the present invention is directed to a method of treating a patient suffering from an antimicrobial drug, e.g. antibiotic, resistant Salmonella infection, comprising the steps of:

a) obtaining or providing a sample containing or suspected of containing at least one Salmonella species from the patient;
b) determining the presence of at least one mutation in at least one gene from the group of genes listed in Table 10, preferably from the group of genes listed in Table 11, wherein the presence of said at least one mutation is indicative of a resistance to one or more antimicrobial, e.g. antibiotic, drugs;
c) identifying said at least one or more antimicrobial, e.g. antibiotic, drugs;
d) selecting one or more antimicrobial, e.g. antibiotic, drugs different from the ones identified in step c) and being suitable for the treatment of a Salmonella infection; and
e) treating the patient with said one or more antimicrobial, e.g. antibiotic, drugs.

[0182] Also in the sixteenth to nineteenth aspect of the invention, steps a) to d) are analogous to the steps in the method of the second aspect of the present invention. Step e) can be sufficiently carried out without being restricted and can be done e.g. non-invasively.

[0183] A twentieth aspect of the present invention is directed to a diagnostic method of determining an infection of a patient with Salmonella species potentially resistant to antimicrobial drug treatment, which can also be described as method of determining an antimicrobial drug, e.g. antibiotic, resistant Salmonella infection of a patient, comprising the steps of:

a) obtaining or providing a sample containing or suspected of containing at least one Salmonella species from the patient;
b) determining the presence of at least one mutation in at least one gene from the group of genes listed in Table 10, preferably from the group of genes listed in Table 11, wherein the presence of said at least one mutation is indicative of an antimicrobial drug, e.g. antibiotic, resistant Salmonella infection in said patient.

TABLE 10
List of genes

| | | | | |
|---|---|---|---|---|
| recN | hemH | UMN798_3428 | metE | yijD |
| UMN798_4831 | UMN798_1939 | copS | UMN798_0628 | UMN798_4878 |
| leuB | recF | pnp | glyQ | dcp |
| thiH | UMN798_1612 | UMN798_2909 | UMN798_1680 | UMN798_4073 |
| yjbC | ytfF | UMN798_3160 | hutU | envC |
| UMN798_3889 | UMN798_1629 | bcfB | degQ | UMN798_1331 |
| trg | uvrC | polB | hpcD | UMN798_1628 |
| UMN798_1701 | glgS | plsB | yjcC | feoB |
| misL | dxr | hemF | rnfG | yhjB |
| UMN798_1163 | UMN798_0394 | alkA | nhaA | lspA |
| UMN798_3890 | UMN798_1632 | malS | dmsC | UMN798_0020 |
| UMN798_1618 | UMN798_1617 | UMN798_4717 | UMN798_0389 | kdpD |
| hisB | UMN798_2727 | UMN798_3918 | UMN798_4753 | UMN798_4936 |
| yhdM | UMN798_0631 | UMN798_1337 | UMN798_1550 | iroE |
| pheT | hofC | fhuD | torS | UMN798_1114 |
| UMN798_2482 | rseB | hycC | ttk | cpdB |
| UMN798_4882 | UMN798_0654 | creA | UMN798_2202 | dppA |
| adiY | UMN798_0653 | gcvP | UMN798_0179 | UMN798_3553 |
| UMN798_4061 | hrpB | UMN798_0975 | | |

TABLE 11
List of genes

| | | | | |
|---|---|---|---|---|
| UMN798_1632 | hemH | UMN798_3428 | ytfF | pnp |
| UMN798_4831 | UMN798_1939 | UMN798_0654 | UMN798_0628 | UMN798_4878 |
| leuB | gcvP | UMN798_0975 | glyQ | dcp |
| thiH | UMN798_1612 | UMN798_2909 | UMN798_1680 | UMN798_4073 |
| yjbC | UMN798_4061 | UMN798_3160 | UMN798_3553 | UMN798_0179 |
| UMN798_3889 | UMN798_1629 | bcfB | degQ | UMN798_1331 |
| trg | UMN798_0653 | adiY | hpcD | UMN798_1628 |
| UMN798_1701 | glgS | dppA | yjcC | UMN798_2202 |
| misL | creA | hemF | rnfG | UMN798_4882 |
| UMN798_1163 | UMN798_0394 | cpdB | nhaA | ttk |
| UMN798_3890 | hycC | malS | dmsC | UMN798_0020 |
| UMN798_1618 | UMN798_1617 | UMN798_4717 | UMN798_0389 | kdpD |
| hisB | UMN798_2727 | UMN798_3918 | UMN798_4753 | UMN798_4936 |
| yhdM | UMN798_0631 | UMN798_1337 | UMN798_1550 | iroE |
| pheT | rseB | UMN798_2482 | torS | UMN798_1114 |

[0184] A twenty-first aspect of the present invention is directed to a method of selecting a treatment of a patient suffering from an antimicrobial drug, e.g. antibiotic, resistant Salmonella infection, comprising the steps of:

a) obtaining or providing a sample containing or suspected of containing at least one Salmonella species from the patient;
b) determining the presence of at least one mutation in at least one gene from the group of genes listed in Table 10, preferably from the group of genes listed in Table 11, wherein the presence of said at least one mutation is indicative of a resistance to one or more antimicrobial, e.g. antibiotic, drugs;
c) identifying said at least one or more antimicrobial, e.g. antibiotic, drugs; and
d) selecting one or more antimicrobial, e.g. antibiotic, drugs different from the ones identified in step c) and being suitable for the treatment of a Salmonella infection.

[0185] Again, in the twentieth and the twenty-first aspect the steps correspond to those in the first or second aspect, although only a mutation in at least one gene is determined.

### EXAMPLES

[0186] The present invention will now be described in detail with reference to several examples thereof. However, these examples are illustrative and do not limit the scope of the invention.

### Example 1

[0187] Whole genome sequencing was carried out in addition to classical antimicrobial susceptibility testing of the same isolates for a cohort of 636 specimens. This allowed performing genome wide correlation studies to find genetic variants (e.g. point mutations, small insertions and deletion, larger structural variants, plasmid copy number gains, gene dosage effects) in the genome and plasmids that are significantly correlated to the resistance against one or several drugs. The approach also allows for comparing the relevant sites in the genome to each other.

[0188] In the approach the different sources of genetic resistance as well as the different ways of how bacteria can become resistant were covered. By measuring clinical isolates collected in a broad geographical area and across a broad time span of three decades a complete picture going far beyond the rather artificial step of laboratory generated resistance mechanisms was tried to be generated.

[0189] To this end, a set of 21 clinically relevant antimicrobial agents with 5 different modes of action was put together, and the minimally inhibitory concentration (MIC) of the 21 drugs for the Salmonella isolates was measured.

[0190] The detailed procedure is given in the following:

### Bacterial Strains

[0191] The inventors selected 636 Salmonella strains, particularly from Salmonella_choleraesuis, Salmonella_dublin, Salmonella_enterica_ssp_arizonae, Salmonella_enterica_ssp_diarizoniae, Salmonella_enteritidis, Salmonella_gallinarum, Salmonella_Group_A, Salmonella_Group_B, Salmonella_Group_C, Salmonella_Group_D, Salmonella_heidelberg, Salmonella_miami, Salmonella_newport, Salmonella_panama, Salmonella_parahaemolyticus_A, Salmonella_paratyphi_A, Salmonella_paratyphi_B, Salmonella_pullorum, Salmonella_senfienberg, Salmonella_species, Salmonella_species_Lac_--,_ONPG_+, Salmonella_species_Lac_+,_ONPG_+, Salmonella_subgenus_I, Salmonella_subgenus_II, Salmonella_subgenus_IV, Salmonella_subgroup_I_Suc+, Salmonella_tennessee, and Salmonella_typhi, from the microbiology strain collection at Siemens Healthcare Diagnostics (West Sacramento, Calif.) for susceptibility testing and whole genome sequencing.

[0192] Antimicrobial Susceptibility Testing (AST) Panels Frozen reference AST panels were prepared following Clinical Laboratory Standards Institute (CLSI) recommendations. The following antimicrobial agents (with μg/ml concentrations shown in parentheses) were included in the panels: Amoxicillin/K Clavulanate (0.5/0.25-64/32), Ampicillin (0.25-128), Ampicillin/Sulbactam (0.5/0.25-64/32), Aztreonam (0.25-64), Cefazolin (0.5-32), Cefepime (0.25-64), Cefotaxime (0.25-128), Ceftazidime (0.25-64), Ceftriaxone (0.25-128), Cefuroxime (1-64), Cephalothin (1-64), Ciprofloxacin (0.015-8), Ertepenem (0.12-32), Gentamicin (0.12-32), Imipenem (0.25-32), Levofloxacin (0.25-16), Meropenem (0.12-32), Piperacillin/Tazobactam (0.25/4-256/4), Tetracycline (0.5-64), Tobramycin (0.12-32), and Trimethoprim/Sulfamethoxazole (0.25/4.7-32/608). Prior to use with clinical isolates, AST panels were tested with QC strains. AST panels were considered acceptable for testing with clinical isolates when the QC results met QC ranges described by CLSI16.

### Inoculum Preparation

[0193] Isolates were cultured on trypticase soy agar with 5% sheep blood (BBL, Cockeysville, Md.) and incubated in ambient air at 35±1° C. for 18-24 h. Isolated colonies (4-5 large colonies or 5-10 small colonies) were transferred to a 3 ml Sterile Inoculum Water (Siemens) and emulsified to a final turbidity of a 0.5 McFarland standard. 2 ml of this suspension was added to 25 ml Inoculum Water with Pluronic-F (Siemens). Using the Inoculator (Siemens) specific for frozen AST panels, 5 μl of the cell suspension was transferred to each well of the AST panel. The inoculated AST panels were incubated in ambient air at 35±1° C. for 16-20 h. Panel results were read visually, and minimal inhibitory concentrations (MIC) were determined.

### DNA Extraction

[0194] Four streaks of each Gram-negative bacterial isolate cultured on trypticase soy agar containing 5% sheep blood and cell suspensions were made in sterile 1.5 ml collection tubes containing 50 μl Nuclease-Free Water (AM9930, Life Technologies). Bacterial isolate samples were stored at −20° C. until nucleic acid extraction. The Tissue Preparation System (TPS) (096D0382-02_01_B, Siemens) and the VERSANT® Tissue Preparation Reagents (TPR) kit (10632404B, Siemens) were used to extract DNA from these bacterial isolates. Prior to extraction, the bacterial isolates were thawed at room temperature and were pelleted at 2000 G for 5 seconds. The DNA extraction protocol DNAext was used for complete total nucleic acid extraction of 48 isolate samples and eluates, 50 μl each, in 4 hours. The total nucleic acid eluates were then transferred into 96-Well qPCR Detection Plates (401341, Agilent Technologies) for RNase A digestion, DNA quantitation, and plate DNA concentration standardization processes. RNase A (AM2271, Life Technologies) which was diluted in nuclease-free water following manufacturer's instructions was added to 50 μl of the total nucleic acid eluate for a final working concentration of 20 μg/ml. Digestion enzyme and eluate mixture were incubated at 37° C. for 30 minutes using Siemens VERSANT® Amplification and Detection instrument. DNA from the RNase digested eluate was quantitated using the Quant-iT™ PicoGreen dsDNA Assay (P11496, Life Technologies) following the assay kit instruction, and fluorescence was determined on the Siemens VERSANT® Amplification and Detection instrument. Data analysis was performed using Microsoft® Excel 2007. 25 μl of the quantitated DNA eluates were transferred into a new 96-Well PCR plate for plate DNA concentration standardization prior to library preparation. Elution buffer from the TPR kit was used to adjust DNA concentration. The standardized DNA eluate plate was then stored at −80° C. until library preparation.

### Next Generation Sequencing

[0195] Prior to library preparation, quality control of isolated bacterial DNA was conducted using a Qubit 2.0 Fluorometer (Qubit dsDNA BR Assay Kit, Life Technologies) and an Agilent 2200 TapeStation (Genomic DNA ScreenTape, Agilent Technologies). NGS libraries were prepared in 96 well format using NexteraXT DNA Sample Preparation Kit and NexteraXT Index Kit for 96 Indexes (Illumina) according to the manufacturer's protocol. The resulting sequencing libraries were quantified in a qPCR-based approach using the KAPA SYBR FAST qPCR MasterMix Kit (Peqlab) on a ViiA 7 real time PCR system (Life Technologies). 96 samples were pooled per lane for paired-end sequencing (2×100 bp) on Illumina Hiseq2000 or Hiseq2500 sequencers using TruSeq PE Cluster v3 and TruSeq SBS v3 sequencing chemistry (Illumina). Basic sequencing quality parameters were determined using the FastQC quality control tool for high throughput sequence data (Babraham Bioinformatics Institute).

### Data Analysis

[0196] Raw paired-end sequencing data for the 636 Salmonella samples were mapped against the Salmonella reference (NC_017046) with BWA 0.6.1.20. The resulting SAM files were sorted, converted to BAM files, and PCR duplicates were marked using the Picard tools package 1.104 (http://picard.sourceforge.net/). The Genome Analysis Toolkit 3.1.1 (GATK)21 was used to call SNPs and indels for blocks of 200 Salmonella samples (parameters: -ploidy 1-glm BOTH-stand_call_conf 30-stand_emit_conf 10). VCF files were combined into a single file and quality filtering for SNPs was carried out (QD<2.0∥FS>60.0∥MQ<40.0) and indels (QD<2.0∥FS>200.0). Detected variants were annotated with SnpEff22 to predict coding effects. For each annotated position, genotypes of all Salmonella samples were considered. Salmonella samples were split into two groups, low resistance group (having lower MIC concentration for the considered drug), and high resistance group (having higher MIC concentrations) with respect to a certain MIC concentration (breakpoint). To find the best breakpoint all thresholds were evaluated and p-values were computed with Fisher's exact test relying on a 2×2 contingency table (number of Salmonella samples having the reference or variant genotype vs. number of samples belonging to the low and high resistance group). The best computed breakpoint was the threshold yielding the lowest p-value for a certain genomic position and drug. For further analyses positions with non-synonymous alterations and p-value<10⁻⁹ were considered.

[0197] Since a potential reason for drug resistance is gene duplication, gene dose dependency was evaluated. For each sample the genomic coverage for each position was determined using BED Tools. Gene ranges were extracted from the reference assembly NC_017046.gff and the normalized median coverage per gene was calculated. To compare low- and high-resistance isolates the best area under the curve (AUC) value was computed. Groups of at least 20% of all samples having a median coverage larger than zero for that gene and containing more than 15 samples per group were considered in order to exclude artifacts and cases with AUC>0.75 were further evaluated.

[0198] To include data on the different ways how resistance mechanisms are acquired Salmonella isolates collected over more than three decades were analyzed such that also horizontal gene transfer could potentially be discovered.

[0199] In detail, the following steps were carried out: Salmonella strains to be tested were seeded on agar plates and incubated under growth conditions for 24 hours. Then, colonies were picked and incubated in growth medium in the presence of a given antibiotic drug in dilution series under growth conditions for 16-20 hours. Bacterial growth was determined by observing turbidity.

[0200] Next mutations were searched that are highly correlated with the results of the phenotypic resistance test.

[0201] For sequencing, samples were prepared using a Nextera library preparation, followed by multiplexed sequencing using the Illuminat HiSeq 2500 system, paired end sequencing. Data were mapped with BWA (Li H. and Durbin R. (2010) Fast and accurate long-read alignment with Burrows-Wheeler Transform. Bioinformatics, Epub. [PMID: 20080505]) and SNP were called using samtools (Li H.*, Handsaker B.*, Wysoker A., Fennell T., Ruan J., Homer N., Marth G., Abecasis G., Durbin R. and 1000 Genome Project Data Processing Subgroup (2009) The Sequence alignment/map (SAM) format and SAMtools. Bioinformatics, 25, 2078-9. [PMID: 19505943]).

[0202] As reference genome, NC_017046 as annotated at the NCBI was determined as best suited.

[0203] The mutations were matched to the genes and the amino acid changes were calculated. Using different algorithms (SVM, homology modeling) mutations leading to amino acid changes with likely pathogenicity/resistance were calculated.

[0204] In total, whole genomes and plasmids of 636 different clinical isolates of Salmonella species were sequenced, and classical antimicrobial susceptibility testing (AST) against 21 therapy forms as described above was performed for all organisms. From the classical AST a table with 636 rows (isolates) and 21 columns (MIC values for 21 drugs) was obtained. Each table entry contained the MIC for the respective isolate and the respective drug. The genetic data were mapped to different reference genomes of Salmonella that have been annotated at the NCBI (http://www.ncbi.nlm.nih.gov/), and the best reference was chosen as template for the alignment—NC_017046 as annotated at the NCBI. Additionally, assemblies were carried out and it was verified that the sequenced genomes fulfil all quality criteria to become reference genomes.

[0205] Next, genetic variants were evaluated. This approach resulted in a table with the genetic sites in columns and the same isolates in 636 rows. Each table entry contained the genetic determinant at the respective site (A, C, T, G, small insertions and deletions, . . . ) for the respective isolate.

[0206] In a next step different statistical tests were carried out
[0207] 1) For comparing resistance/susceptibility to genetic sites we calculated contingency tables and determined the significance using Fishers test
[0208] 2) For comparing different sites to each other we calculated the correlation between different genetic sites
[0209] 3) For detecting gene dosage effects, e.g. loss or gain of genes (in the genome or on plasmids) we calculated the coverage (i.e. how many read map to the current position) at each site for resistant and not resistant isolates.

[0210] From the data, first the 50 genes with the best p-value were chosen for the list of mutations as well as the list of correlated antibiotic resistance, representing Tables 1 and 2.

[0211] A full list of all genetic sites, drugs, drug classes, affected genes etc. is provided in Tables 3 and 4a, 4b and 4c, wherein Table 3 corresponds to Table 1 and represents the genes having the lowest p-values after determining mutations in the genes, and Table 4, respectively Tables 4a, 4b and 4c correspond to Table 2 and represent the genes having the lowest p-values after correlating the mutations with antibiotic resistance for the respective antibiotics.

[0212] In addition, the data with the best p-values for each antibiotic class with the most antibiotic drugs as well as each antibiotic, respectively, were evaluated, being disclosed in Tables 5-9.

[0213] In Tables 3-9 the columns are designated as follows: Gene name: affected gene;

POS: genomic position of the SNP/variant in the Salmonella reference genome (see above);
p-value: significance value calculated using Fishers exact test (determined according to FDR (Benjamini Hochberg) method (Benjamini Hochberg, 1995));
genbank protein accession number: (NCBI) Accession number of the corresponding protein of the genes

TABLE 3
Detailed results for the genes in Example 1 (corresponding to Table 1)

| | | #drug | | | genbank protein |
|---|---|---|---|---|---|
| POS | drug class | classes | p-value | gene name | accession number |
| 2833888 | polyketide (tetracycline); Lactams; | 3 | 1.03434E−49 | recN | YP_005398056.1 |
| | aminoglycoside | | | | |
| 546961 | polyketide (tetracycline); Lactams; | 3 | 2.16472E−49 | hemH | YP_005395984.1 |
| | aminoglycoside | | | | |
| 3334479 | polyketide (tetracycline); Lactams; | 3 | 2.16472E−49 | UMN798_3428 | YP_005398501.1 |
| | aminoglycoside | | | | |
| 4191057 | polyketide (tetracycline); Lactams; | 3 | 2.16472E−49 | metE | YP_005399262.1 |
| | aminoglycoside | | | | |
| 4366486 | polyketide (tetracycline); Lactams; | 3 | 2.16472E−49 | yijD | YP_005399415.1 |
| | aminoglycoside | | | | |
| 4724403 | polyketide (tetracycline); Lactams; | 3 | 2.16472E−49 | UMN798_4831 | YP_005399714.1 |
| | aminoglycoside | | | | |
| 1895588 | polyketide (tetracycline); Lactams; | 3 | 3.03206E−49 | UMN798_1939 | YP_005397219.1 |
| | aminoglycoside | | | | |
| 1139812 | polyketide (tetracycline); Lactams; | 3 | 1.30591E−48 | copS | YP_005396510.1 |
| | aminoglycoside | | | | |
| 637461 | polyketide (tetracycline); Lactams; | 3 | 6.68901E−47 | UMN798_0628 | YP_005396068.1 |
| | aminoglycoside | | | | |
| 4779417 | polyketide (tetracycline); Lactams; | 3 | 3.07597E−46 | UMN798_4878 | YP_005399754.1 |
| | aminoglycoside | | | | |
| 131219 | polyketide (tetracycline); Lactams; | 3 | 3.79108E−45 | leuB | YP_005395624.1 |
| | aminoglycoside | | | | |
| 4062015 | polyketide (tetracycline); Lactams; | 3 | 5.78617E−45 | recF | YP_005399154.1 |
| | aminoglycoside | | | | |
| 2983118 | polyketide (tetracycline); Lactams; | 3 | 7.30419E−45 | emrA | YP_005398183.1 |
| | aminoglycoside | | | | |
| 3861998 | polyketide (tetracycline); Lactams; | 3 | 1.47298E−44 | glyQ | YP_005398978.1 |
| | aminoglycoside | | | | |
| 1548464 | polyketide (tetracycline); Lactams; | 3 | 2.06883E−43 | dcp | YP_005396900.1 |
| | aminoglycoside | | | | |
| 4397111 | polyketide (tetracycline); Lactams; | 3 | 3.53351E−43 | thiH | YP_005399435.1 |
| | aminoglycoside | | | | |
| 1574737 | polyketide (tetracycline); Lactams; | 3 | 2.20543E−42 | UMN798_1612 | YP_005396930.1 |
| | aminoglycoside | | | | |
| 2840330 | polyketide (tetracycline); Lactams; | 3 | 3.28817E−42 | UMN798_2909 | YP_005398061.1 |
| | aminoglycoside | | | | |
| 1650934 | polyketide (tetracycline); Lactams; | 3 | 4.50718E−42 | UMN798_1680 | YP_005396992.1 |
| | aminoglycoside | | | | |
| 3966175 | polyketide (tetracycline); Lactams; | 3 | 5.93558E−42 | UMN798_4073 | YP_005399073.1 |
| | aminoglycoside | | | | |
| 4436188 | polyketide (tetracycline); Lactams; | 3 | 5.9971E−42 | yjbC | YP_005399464.1 |
| | aminoglycoside | | | | |
| 2780306 | polyketide (tetracycline); Lactams; | 3 | 1.5881E−41 | nadB | YP_005398008.1 |
| | aminoglycoside | | | | |
| 3075942 | polyketide (tetracycline); Lactams; | 3 | 1.90155E−41 | UMN798_3160 | YP_005398272.1 |
| | aminoglycoside | | | | |
| 855087 | polyketide (tetracycline); Lactams; | 3 | 7.25896E−41 | hutU | YP_005396263.1 |
| | aminoglycoside | | | | |
| 3582301 | polyketide (tetracycline); Lactams; | 3 | 7.67646E−41 | envC | YP_005398732.1 |
| | aminoglycoside | | | | |
| 3772654 | polyketide (tetracycline); Lactams; | 3 | 1.08166E−40 | UMN798_3889 | YP_005398910.1 |
| | aminoglycoside | | | | |
| 1590194 | polyketide (tetracycline); Lactams; | 3 | 1.52394E−40 | UMN798_1629 | YP_005396944.1 |
| | aminoglycoside | | | | |
| 25574 | polyketide (tetracycline); Lactams; | 3 | 2.23532E−40 | bcfB | YP_005395534.1 |
| | aminoglycoside | | | | |
| 3536122 | aminoglycoside; Lactams | 2 | 2.63263E−40 | degQ | YP_005398691.1 |
| 1313897 | polyketide (tetracycline); Lactams; | 3 | 2.91148E−40 | UMN798_1331 | YP_005396683.1 |
| | aminoglycoside | | | | |
| 1673475 | polyketide (tetracycline); Lactams; | 3 | 3.8896E−40 | trg | YP_005397014.1 |
| | aminoglycoside | | | | |
| 1994028 | polyketide (tetracycline); Lactams; | 3 | 3.8896E−40 | uvrC | YP_005397309.1 |
| | aminoglycoside | | | | |
| 115342 | polyketide (tetracycline); Lactams; | 3 | 7.82734E−40 | polB | YP_005395610.1 |
| | aminoglycoside | | | | |
| 1148509 | polyketide (tetracycline); Lactams; | 3 | 8.03033E−40 | hpcD | YP_005396519.1 |
| | aminoglycoside | | | | |
| 1589819 | polyketide (tetracycline); Lactams; | 3 | 8.03033E−40 | UMN798_1628 | YP_005396943.1 |
| | aminoglycoside | | | | |
| 1672517 | polyketide (tetracycline); Lactams; | 3 | 8.09948E−40 | UMN798_1701 | YP_005397013.1 |
| | aminoglycoside | | | | |
| 3379140 | polyketide (tetracycline); Lactams; | 3 | 9.6031E−40 | glgS | YP_005398544.1 |
| | aminoglycoside | | | | |
| 4478134 | polyketide (tetracycline); Lactams; | 3 | 9.6031E−40 | plsB | YP_005399505.1 |
| | aminoglycoside | | | | |
| 4523874 | polyketide (tetracycline); Lactams; | 3 | 1.24792E−39 | yjcC | YP_005399531.1 |
| | aminoglycoside | | | | |
| 3686566 | polyketide (tetracycline); Lactams; | 3 | 1.3875E−39 | feoB | YP_005398837.1 |
| | aminoglycoside | | | | |
| 3976726 | polyketide (tetracycline); Lactams; | 3 | 1.3875E−39 | misL | YP_005399078.1 |
| | aminoglycoside | | | | |
| 258966 | polyketide (tetracycline); Lactams; | 3 | 1.4329E−39 | dxr | YP_005395732.1 |
| | aminoglycoside | | | | |
| 2558379 | polyketide (tetracycline); Lactams; | 3 | 1.45191E−39 | hemF | YP_005397834.1 |
| | aminoglycoside | | | | |
| 1487086 | polyketide (tetracycline); Lactams; | 3 | 1.71803E−39 | rnfG | YP_005396848.1 |
| | aminoglycoside | | | | |
| 3799879 | polyketide (tetracycline); Lactams; | 3 | 1.71803E−39 | yhjB | YP_005398931.1 |
| | aminoglycoside | | | | |
| 1163470 | polyketide (tetracycline); Lactams; | 3 | 2.82119E−39 | UMN798_1163 | YP_005396535.1 |
| | aminoglycoside | | | | |
| 409259 | polyketide (tetracycline); Lactams; | 3 | 3.02872E−39 | UMN798_0394 | YP_005395859.1 |
| | aminoglycoside | | | | |
| 2208848 | polyketide (tetracycline); Lactams; | 3 | 3.17482E−39 | alkA | YP_005397522.1 |
| | aminoglycoside | | | | |
| 46695 | polyketide (tetracycline); Lactams; | 3 | 3.75244E−39 | nhaA | YP_005395552.1 |
| | aminoglycoside | | | | |
| 56998 | polyketide (tetracycline); Lactams; | 3 | 3.75244E−39 | lspA | YP_005395561.1 |
| | aminoglycoside | | | | |
| 3582354 | polyketide (tetracycline); Lactams; | 3 | 4.47627E−40 | envC | YP_005398732.1 |
| | aminoglycoside | | | | |
| 3335426 | polyketide (tetracycline); Lactams; | 3 | 1.71803E−39 | UMN798_3428 | YP_005398501.1 |
| | aminoglycoside | | | | |
| 1673444 | polyketide (tetracycline); Lactams; | 3 | 2.82119E−39 | trg | YP_005397014.1 |
| | aminoglycoside | | | | |

TABLE 4a
Detailed results for the genes in Example 1 (corresponding to Table 2)

| POS | drug | #drugs | drug class | #drug classes |
|---|---|---|---|---|
| 2833888 | CF; TE; A/S; CRM; P/T; TO; AM; AUG | 8 | Polyketide*; Lactams; aminoglycoside | 3 |
| 546961 | CF; TE; A/S; CRM; P/T; TO; AM; AUG | 8 | Polyketide*; Lactams; aminoglycoside | 3 |
| 3334479 | CF; TE; A/S; CRM; P/T; TO; AM; AUG | 8 | Polyketide*; Lactams; aminoglycoside | 3 |
| 4191057 | CF; TE; A/S; CRM; P/T; TO; AM; AUG | 8 | Polyketide*; Lactams; aminoglycoside | 3 |
| 4366486 | CF; TE; A/S; CRM; P/T; TO; AM; AUG | 8 | Polyketide*; Lactams; aminoglycoside | 3 |
| 4724403 | CF; TE; A/S; CRM; P/T; TO; AM; AUG | 8 | Polyketide*; Lactams; aminoglycoside | 3 |
| 1895588 | CF; TE; A/S; CRM; P/T; TO; AM; AUG | 8 | Polyketide*; Lactams; aminoglycoside | 3 |
| 1139812 | CF; TE; A/S; CRM; P/T; TO; AM; AUG | 8 | Polyketide*; Lactams; aminoglycoside | 3 |
| 637461 | CF; TE; A/S; CRM; P/T; TO; AM; AUG | 8 | Polyketide*; Lactams; aminoglycoside | 3 |
| 4779417 | CF; TE; CFZ; CRM; P/T; TO; AM; A/S; AUG | 9 | Polyketide*; Lactams; aminoglycoside | 3 |
| 131219 | CF; TE; A/S; CRM; P/T; TO; AM; AUG | 8 | Polyketide*; Lactams; aminoglycoside | 3 |
| 4062015 | CF; TE; A/S; CRM; P/T; TO; AM; AUG | 8 | Polyketide*; Lactams; aminoglycoside | 3 |
| 2983118 | CF; TE; CFZ; CRM; P/T; TO; AM; A/S; AUG | 9 | Polyketide*; Lactams; aminoglycoside | 3 |
| 3861998 | CF; TE; A/S; CRM; P/T; TO; AM; AUG | 8 | Polyketide*; Lactams; aminoglycoside | 3 |
| 1548464 | CF; TE; CFZ; CRM; P/T; TO; AM; A/S; AUG | 9 | Polyketide*; Lactams; aminoglycoside | 3 |
| 4397111 | CF; TE; A/S; CRM; P/T; TO; AM; AUG | 8 | Polyketide*; Lactams; aminoglycoside | 3 |
| 1574737 | CF; TE; CFZ; CRM; P/T; TO; AM; A/S; AUG | 9 | Polyketide*; Lactams; aminoglycoside | 3 |
| 2840330 | TE; GM; A/S; CRM; P/T; TO; AM; AUG | 8 | Polyketide*; Lactams; aminoglycoside | 3 |
| 1650934 | CF; TE; A/S; CRM; P/T; TO; AM; AUG | 8 | Polyketide*; Lactams; aminoglycoside | 3 |
| 3966175 | TE; A/S; CRM; P/T; TO; AM; AUG | 7 | Polyketide*; Lactams; aminoglycoside | 3 |
| 4436188 | CF; TE; A/S; CRM; P/T; TO; AM; AUG | 8 | Polyketide*; Lactams; aminoglycoside | 3 |
| 2780306 | TE; A/S; CRM; P/T; TO; AM; AUG | 7 | Polyketide*; Lactams; aminoglycoside | 3 |
| 3075942 | CF; TE; A/S; CRM; P/T; TO; AM; AUG | 8 | Polyketide*; Lactams; aminoglycoside | 3 |
| 855087 | CF; TE; A/S; CRM; P/T; TO; AM; AUG | 8 | Polyketide*; Lactams; aminoglycoside | 3 |
| 3582301 | CF; TE; A/S; CRM; P/T; TO; AUG | 7 | Polyketide*; Lactams; aminoglycoside | 3 |
| 3772654 | CF; TE; CFZ; CRM; P/T; TO; AM; A/S; AUG | 9 | Polyketide*; Lactams; aminoglycoside | 3 |
| 1590194 | CF; TE; A/S; CRM; P/T; TO; AUG | 7 | Polyketide*; Lactams; aminoglycoside | 3 |
| 25574 | TE; GM; A/S; CRM; P/T; TO; AM; AUG | 8 | Polyketide*; Lactams; aminoglycoside | 3 |
| 3536122 | GM; A/S; CRM; P/T; TO; AM; AUG | 7 | aminoglycoside; Lactams | 2 |
| 1313897 | CF; TE; CFZ; CRM; P/T; TO; AM; A/S; AUG | 9 | Polyketide*; Lactams; aminoglycoside | 3 |
| 1673475 | CF; TE; A/S; CRM; P/T; TO; AUG | 7 | Polyketide*; Lactams; aminoglycoside | 3 |
| 1994028 | CF; TE; A/S; CRM; P/T; TO; AM; AUG | 8 | Polyketide*; Lactams; aminoglycoside | 3 |
| 115342 | TE; GM; A/S; CRM; P/T; TO; AM; AUG | 8 | Polyketide*; Lactams; aminoglycoside | 3 |
| 1148509 | TE; GM; A/S; CRM; P/T; TO; AM; AUG | 8 | Polyketide*; Lactams; aminoglycoside | 3 |
| 1589819 | CF; TE; A/S; CRM; P/T; TO; AUG | 7 | Polyketide*; Lactams; aminoglycoside | 3 |
| 1672517 | CF; TE; A/S; CRM; P/T; TO; AUG | 7 | Polyketide*; Lactams; aminoglycoside | 3 |
| 3379140 | TE; GM; A/S; CRM; P/T; TO; AM; AUG | 8 | Polyketide*; Lactams; aminoglycoside | 3 |
| 4478134 | TE; GM; A/S; CRM; P/T; TO; AM; AUG | 8 | Polyketide*; Lactams; aminoglycoside | 3 |
| 4523874 | TE; A/S; CRM; P/T; TO; AM; AUG | 7 | Polyketide*; Lactams; aminoglycoside | 3 |
| 3686566 | TE; GM; A/S; CRM; P/T; TO; AM; AUG | 8 | Polyketide*; Lactams; aminoglycoside | 3 |
| 3976726 | CF; TE; A/S; CRM; P/T; TO; AM; AUG | 8 | Polyketide*; Lactams; aminoglycoside | 3 |
| 258966 | TE; A/S; CRM; P/T; TO; AM; AUG | 7 | Polyketide*; Lactams; aminoglycoside | 3 |
| 2558379 | TE; A/S; CRM; P/T; TO; AM; AUG | 7 | Polyketide*; Lactams; aminoglycoside | 3 |
| 1487086 | TE; GM; A/S; CRM; P/T; TO; AM; AUG | 8 | Polyketide*; Lactams; aminoglycoside | 3 |
| 3799879 | TE; GM; A/S; CRM; P/T; TO; AM; AUG | 8 | Polyketide*; Lactams; aminoglycoside | 3 |
| 1163470 | TE; GM; A/S; CRM; P/T; TO; AM; AUG | 8 | Polyketide*; Lactams; aminoglycoside | 3 |
| 409259 | TE; A/S; CRM; P/T; TO; AM; AUG | 7 | Polyketide*; Lactams; aminoglycoside | 3 |
| 2208848 | TE; GM; A/S; CRM; P/T; TO; AM; AUG | 8 | Polyketide*; Lactams; aminoglycoside | 3 |
| 46695 | TE; GM; A/S; CRM; P/T; TO; AM; AUG | 8 | Polyketide*; Lactams; aminoglycoside | 3 |
| 56998 | TE; GM; A/S; CRM; P/T; TO; AM; AUG | 8 | Polyketide*; Lactams; aminoglycoside | 3 |
| 3582354 | CF; TE; A/S; CRM; P/T; TO; AUG | 7 | Polyketide*; Lactams; aminoglycoside | 3 |
| 3335426 | TE; GM; A/S; CRM; P/T; TO; AM; AUG | 8 | Polyketide*; Lactams; aminoglycoside | 3 |
| 1673444 | CF; TE; A/S; CRM; P/T; TO; AUG | 7 | Polyketide*; Lactams; aminoglycoside | 3 |

*(tetracycline)

TABLE 4b
Detailed results for the genes in Example 1 (corresponding to Table 2, continued)

| | | | | | #significant | #significant other |
|---|---|---|---|---|---|---|
| | best | #significant | #significant | #significant | polyketide | (benzene derived)/ |
| POS | drug | Lactams | fluoroquinolones | aminoglycosides | (tetracycline) | sulfonamide |
| 2833888 | AUG | 6 | 0 | 1 | 1 | 0 |
| 546961 | AUG | 6 | 0 | 1 | 1 | 0 |
| 3334479 | AUG | 6 | 0 | 1 | 1 | 0 |
| 4191057 | AUG | 6 | 0 | 1 | 1 | 0 |
| 4366486 | AUG | 6 | 0 | 1 | 1 | 0 |
| 4724403 | AUG | 6 | 0 | 1 | 1 | 0 |
| 1895588 | AUG | 6 | 0 | 1 | 1 | 0 |
| 1139812 | AUG | 6 | 0 | 1 | 1 | 0 |
| 637461 | AUG | 6 | 0 | 1 | 1 | 0 |
| 4779417 | AUG | 7 | 0 | 1 | 1 | 0 |
| 131219 | AUG | 6 | 0 | 1 | 1 | 0 |
| 4062015 | AUG | 6 | 0 | 1 | 1 | 0 |
| 2983118 | AUG | 7 | 0 | 1 | 1 | 0 |
| 3861998 | AUG | 6 | 0 | 1 | 1 | 0 |
| 1548464 | AUG | 7 | 0 | 1 | 1 | 0 |
| 4397111 | AUG | 6 | 0 | 1 | 1 | 0 |
| 1574737 | AUG | 7 | 0 | 1 | 1 | 0 |
| 2840330 | AUG | 5 | 0 | 2 | 1 | 0 |
| 1650934 | AUG | 6 | 0 | 1 | 1 | 0 |
| 3966175 | AUG | 5 | 0 | 1 | 1 | 0 |
| 4436188 | AUG | 6 | 0 | 1 | 1 | 0 |
| 2780306 | AUG | 5 | 0 | 1 | 1 | 0 |
| 3075942 | AUG | 6 | 0 | 1 | 1 | 0 |
| 855087 | AUG | 6 | 0 | 1 | 1 | 0 |
| 3582301 | P/T | 5 | 0 | 1 | 1 | 0 |
| 3772654 | AUG | 7 | 0 | 1 | 1 | 0 |
| 1590194 | P/T | 5 | 0 | 1 | 1 | 0 |
| 25574 | AUG | 5 | 0 | 2 | 1 | 0 |
| 3536122 | AUG | 5 | 0 | 2 | 0 | 0 |
| 1313897 | AUG | 7 | 0 | 1 | 1 | 0 |
| 1673475 | P/T | 5 | 0 | 1 | 1 | 0 |
| 1994028 | AUG | 6 | 0 | 1 | 1 | 0 |
| 115342 | TO | 5 | 0 | 2 | 1 | 0 |
| 1148509 | TO | 5 | 0 | 2 | 1 | 0 |
| 1589819 | P/T | 5 | 0 | 1 | 1 | 0 |
| 1672517 | P/T | 5 | 0 | 1 | 1 | 0 |
| 3379140 | TO | 5 | 0 | 2 | 1 | 0 |
| 4478134 | TO | 5 | 0 | 2 | 1 | 0 |
| 4523874 | AUG | 5 | 0 | 1 | 1 | 0 |
| 3686566 | AUG | 5 | 0 | 2 | 1 | 0 |
| 3976726 | AUG | 6 | 0 | 1 | 1 | 0 |
| 258966 | AUG | 5 | 0 | 1 | 1 | 0 |
| 2558379 | AUG | 5 | 0 | 1 | 1 | 0 |
| 1487086 | TO | 5 | 0 | 2 | 1 | 0 |
| 3799879 | TO | 5 | 0 | 2 | 1 | 0 |
| 1163470 | TO | 5 | 0 | 2 | 1 | 0 |
| 409259 | AUG | 5 | 0 | 1 | 1 | 0 |
| 2208848 | TO | 5 | 0 | 2 | 1 | 0 |
| 46695 | TO | 5 | 0 | 2 | 1 | 0 |
| 56998 | TO | 5 | 0 | 2 | 1 | 0 |
| 3582354 | P/T | 5 | 0 | 1 | 1 | 0 |
| 3335426 | TO | 5 | 0 | 2 | 1 | 0 |
| 1673444 | P/T | 5 | 0 | 1 | 1 | 0 |

TABLE 4c
Detailed results for the genes in Example 1
(corresponding to Table 2, continued)

| | | | genbank protein |
|---|---|---|---|
| POS | p-value | gene name | accession number |
| 2833888 | 1.03434E−49 | recN | YP_005398056.1 |
| 546961 | 2.16472E−49 | hemH | YP_005395984.1 |
| 3334479 | 2.16472E−49 | UMN798_3428 | YP_005398501.1 |
| 4191057 | 2.16472E−49 | metE | YP_005399262.1 |
| 4366486 | 2.16472E−49 | yijD | YP_005399415.1 |
| 4724403 | 2.16472E−49 | UMN798_4831 | YP_005399714.1 |
| 1895588 | 3.03206E−49 | UMN798_1939 | YP_005397219.1 |
| 1139812 | 1.30591E−48 | copS | YP_005396510.1 |
| 637461 | 6.68901E−47 | UMN798_0628 | YP_005396068.1 |
| 4779417 | 3.07597E−46 | UMN798_4878 | YP_005399754.1 |
| 131219 | 3.79108E−45 | leuB | YP_005395624.1 |
| 4062015 | 5.78617E−45 | recF | YP_005399154.1 |
| 2983118 | 7.30419E−45 | emrA | YP_005398183.1 |
| 3861998 | 1.47298E−44 | glyQ | YP_005398978.1 |
| 1548464 | 2.06883E−43 | dcp | YP_005396900.1 |
| 4397111 | 3.53351E−43 | thiH | YP_005399435.1 |
| 1574737 | 2.20543E−42 | UMN798_1612 | YP_005396930.1 |
| 2840330 | 3.28817E−42 | UMN798_2909 | YP_005398061.1 |
| 1650934 | 4.50718E−42 | UMN798_1680 | YP_005396992.1 |
| 3966175 | 5.93558E−42 | UMN798_4073 | YP_005399073.1 |
| 4436188 | 5.9971E−42 | yjbC | YP_005399464.1 |
| 2780306 | 1.5881E−41 | nadB | YP_005398008.1 |
| 3075942 | 1.90155E−41 | UMN798_3160 | YP_005398272.1 |
| 855087 | 7.25896E−41 | hutU | YP_005396263.1 |
| 3582301 | 7.67646E−41 | envC | YP_005398732.1 |
| 3772654 | 1.08166E−40 | UMN798_3889 | YP_005398910.1 |
| 1590194 | 1.52394E−40 | UMN798_1629 | YP_005396944.1 |
| 25574 | 2.23532E−40 | bcfB | YP_005395534.1 |
| 3536122 | 2.63263E−40 | degQ | YP_005398691.1 |
| 1313897 | 2.91148E−40 | UMN798_1331 | YP_005396683.1 |
| 1673475 | 3.8896E−40 | trg | YP_005397014.1 |
| 1994028 | 3.8896E−40 | uvrC | YP_005397309.1 |
| 115342 | 7.82734E−40 | polB | YP_005395610.1 |
| 1148509 | 8.03033E−40 | hpcD | YP_005396519.1 |
| 1589819 | 8.03033E−40 | UMN798_1628 | YP_005396943.1 |
| 1672517 | 8.09948E−40 | UMN798_1701 | YP_005397013.1 |
| 3379140 | 9.6031E−40 | glgS | YP_005398544.1 |
| 4478134 | 9.6031E−40 | plsB | YP_005399505.1 |
| 4523874 | 1.24792E−39 | yjcC | YP_005399531.1 |
| 3686566 | 1.3875E−39 | feoB | YP_005398837.1 |
| 3976726 | 1.3875E−39 | misL | YP_005399078.1 |
| 258966 | 1.4329E−39 | dxr | YP_005395732.1 |
| 2558379 | 1.45191E−39 | hemF | YP_005397834.1 |
| 1487086 | 1.71803E−39 | rnfG | YP_005396848.1 |
| 3799879 | 1.71803E−39 | yhjB | YP_005398931.1 |
| 1163470 | 2.82119E−39 | UMN798_1163 | YP_005396535.1 |
| 409259 | 3.02872E−39 | UMN798_0394 | YP_005395859.1 |
| 2208848 | 3.17482E−39 | alkA | YP_005397522.1 |
| 46695 | 3.75244E−39 | nhaA | YP_005395552.1 |
| 56998 | 3.75244E−39 | lspA | YP_005395561.1 |
| 3582354 | 4.47627E−40 | envC | YP_005398732.1 |
| 3335426 | 1.71803E−39 | UMN798_3428 | YP_005398501.1 |
| 1673444 | 2.82119E−39 | trg | YP_005397014.1 |

[0214] Also the antibiotic/drug classes, the number of significant antibiotics correlated to the mutations (over all antibiotics or over certain classes), as well as the correlated antibiotics are denoted in the Tables.

[0215] The p-value was calculated using the Fisher exact test based on contingency table with 4 fields: #samples Resistant/wild type; #samples Resistant/mutant; #samples not Resistant/wild type; #samples not Resistant/mutant

[0216] The test is based on the distribution of the samples in the 4 fields. Even distribution indicates no significance, while clustering into two fields indicates significance.

[0217] The following results were obtained
[0218] A total of approx. 55.800 different correlations between genetic sites and anti-microbial agents were detected (p-value<10⁻¹⁰).
[0219] The biggest part of these were point mutations (i.e. single base exchanges)
[0220] The highest significance that was reached was 10⁻⁴⁹
[0221] Besides these, insertions or deletions of up to four bases were discovered
[0222] Further, potential genetic tests for four different drug classes relating to resistances were discovered
   [0223] β-lactams (includes Penicillins, Cephalosporins, Carbapenems, Monobactams)
   [0224] Quinolones, particularly Fluoroquinolones
   [0225] Aminoglycosides
   [0226] Polyketides, particularly Tetracyclines
[0227] Mutations were observed in 3,874 different genes

[0228] While in the tables only the best mutations in each gene are represented, a manifold of different SNPs has been found for each gene. Examples for multiple SNPs for two of the genes given in Table 3 are shown in the following Tables 12 and 13.

TABLE 12
Statistically significant SNPs in gene bcfB
(genbank protein accession number YP_005395534.1) (headers as
in Tables 3 and 4, respectively)

| | | | | best | |
|---|---|---|---|---|---|
| POS | drug | #drugs | drug class | drug | p-value |
| 25565 | CRM; P/T; AUG | 3 | Lactams | CRM | 1.3351E−016 |
| 25114 | TE; TO; CRM | 3 | Polyketide*; Lactams; | TE | 2.7943E−011 |
| | | | aminoglycoside | | |
| 25182 | TO; GM | 2 | aminoglycoside | GM | 1.3816E−013 |
| 25616 | CF; TE; A/S; CRM; | 7 | Polyketide*; Lactams; | P/T | 1.9318E−035 |
| | P/T; TO; AUG | | aminoglycoside | | |
| 25602 | CRM; P/T; AUG | 3 | Lactams | CRM | 1.3351E−016 |
| 25617 | CF; TE; A/S; CRM; | 7 | Polyketide*; Lactams; | P/T | 8.6136E−035 |
| | P/T; TO; AUG | | aminoglycoside | | |
| 25575 | TO; GM | 2 | aminoglycoside | TO | 5.0004E−015 |
| 25722 | AUG | 1 | Lactams | AUG | 8.5373E−010 |
| 25559 | CRM; P/T; AUG | 3 | Lactams | CRM | 2.9472E−016 |
| 25120 | TE; P/T; TO; CRM; | 5 | Polyketide*; Lactams; | P/T | 1.1032E−025 |
| | AUG | | aminoglycoside | | |
| 25455 | A/S; AM; AUG | 3 | Lactams | AM | 7.4430E−022 |
| 25052 | A/S; P/T; AUG | 3 | Lactams | P/T | 3.1479E−016 |
| 25598 | A/S; P/T; AUG | 3 | Lactams | P/T | 9.4153E−016 |
| 25272 | CF; TE; A/S; CRM; | 7 | Polyketide*; Lactams; | P/T | 1.9318E−035 |
| | P/T; TO; AUG | | aminoglycoside | | |
| 25109 | TE; P/T; TO; CRM; | 5 | Polyketide*; Lactams; | P/T | 2.6436E−024 |
| | AUG | | aminoglycoside | | |
| 25643 | TE; P/T; TO; CRM; | 5 | Polyketide*; Lactams; | P/T | 3.10088119075937E−026 |
| | AUG | | aminoglycoside | | |
| 25043 | CRM; P/T; AUG | 3 | Lactams | CRM | 1.3860E−016 |
| 25787 | TE; P/T; TO; CRM; | 5 | Polyketide*; Lactams; | P/T | 3.1009E−026 |
| | AUG | | aminoglycoside | | |
| 25703 | CRM; P/T; AUG | 3 | Lactams | CRM | 1.3860E−016 |
| 25712 | TO; GM | 2 | aminoglycoside | TO | 8.3819E−022 |
| 25122 | TE; TO; CRM | 3 | Polyketide*; Lactams; | TE | 1.1259E−012 |
| | | | aminoglycoside | | |
| 25071 | CRM; P/T; AUG | 3 | Lactams | P/T | 4.4353E−018 |
| 25089 | A/S; P/T; AUG | 3 | Lactams | P/T | 7.961E−015 |
| 25551 | CRM; P/T; AUG | 3 | Lactams | CRM | 1.3351E−016 |
| 25557 | CRM; P/T; AUG | 3 | Lactams | P/T | 4.3112E−017 |
| 25655 | A/S; P/T; AUG | 3 | Lactams | P/T | 1.4988E−015 |
| 25123 | TE; A/S; CRM; P/T; | 6 | Polyketide*; Lactams; | P/T | 4.8019E−015 |
| | TO; AUG | | aminoglycoside | | |
| 25599 | CF; TE; A/S; CRM; | 7 | Polyketide*; Lactams; | P/T | 1.9318E−035 |
| | P/T; TO; AUG | | aminoglycoside | | |
| 25053 | CRM; P/T; AUG | 3 | Lactams | P/T | 2.9857E−016 |
| 25074 | TE; P/T; TO; CRM; | 5 | Polyketide*; Lactams; | P/T | 6.3651E−026 |
| | AUG | | aminoglycoside | | |
| 25045 | CRM; P/T; AUG | 3 | Lactams | CRM | 1.3860E−016 |
| 25094 | CRM; P/T; AUG | 3 | Lactams | P/T | 1.4259E−016 |
| 25583 | A/S; P/T; AUG | 3 | Lactams | P/T | 9.4153E−016 |
| 25562 | TE; P/T; TO; CRM; | 5 | Polyketide*; Lactams; | P/T | 7.0754E−025 |
| | AUG | | aminoglycoside | | |
| 25484 | TE; P/T; CRM; AUG | 4 | Polyketide*; Lactams | P/T | 2.3718E−018 |
| 25741 | A/S; P/T; AUG | 3 | Lactams | P/T | 9.4153E−016 |
| 25596 | CRM; P/T; AUG | 3 | Lactams | CRM | 1.3351E−016 |
| 25340 | TE; P/T; TO; CRM; | 5 | Polyketide*; Lactams; | P/T | 2.4030E−025 |
| | AUG | | aminoglycoside | | |
| 25574 | TE; GM; A/S; CRM; | 8 | Polyketide*; Lactams; | AUG | 2.2353E−040 |
| | P/T; TO; AM; AUG | | aminoglycoside | | |
| 25493 | A/S; P/T; AUG | 3 | Lactams | P/T | 2.9312E−015 |
| 25790 | A/S; P/T; AUG | 3 | Lactams | P/T | 9.4153E−016 |
| 25256 | TE; TO; CRM | 3 | Polyketide*; Lactams; | TE | 4.2851E−012 |
| | | | aminoglycoside | | |

*(tetracycline)

TABLE 13
Statistically significant SNPs in gene nhaA
(genbank protein accession number YP_005395552.1) (headers as
in Tables 3 and 4, respectively)

| | | | | best | |
|---|---|---|---|---|---|
| POS | drug | #drugs | drug class | drug | p-value |
| 46308 | TE; P/T; TO; CRM; | 5 | Polyketide*; Lactams; | P/T | 6.7496E−025 |
| | AUG | | aminoglycoside | | |
| 46413 | CRM; P/T; AUG | 3 | Lactams | CRM | 1.1274E−016 |
| 46765 | A/S; P/T; AUG | 3 | Lactams | P/T | 8.5117E−015 |
| 46724 | CRM; P/T; AUG | 3 | Lactams | CRM | 1.1274E−016 |
| 46205 | A/S; P/T; AUG | 3 | Lactams | P/T | 2.4320E−015 |
| 47033 | A/S; TO; AM; GM | 4 | aminoglycoside; | TO | 7.3361E−017 |
| | | | Lactams | | |
| 46695 | TE; GM; A/S; CRM; | 8 | Polyketide*; Lactams; | TO | 3.7524E−039 |
| | P/T; TO; AM; AUG | | aminoglycoside | | |
| 47257 | A/S; P/T; AUG | 3 | Lactams | P/T | 7.8918E−016 |
| 47247 | A/S; TO; AM; AUG | 4 | aminoglycoside; | AM | 6.5822E−016 |
| | | | Lactams | | |
| 46950 | A/S; P/T; AUG | 3 | Lactams | P/T | 7.8918E−016 |
| 46440 | A/S; P/T; AUG | 3 | Lactams | P/T | 7.8918E−016 |
| 46474 | A/S; P/T; AUG | 3 | Lactams | P/T | 7.8918E−016 |
| 46830 | A/S; P/T; AUG | 3 | Lactams | P/T | 1.2790E−016 |

*(tetracycline)

[0229] Similar results were obtained for other genes but are omitted for the sake of brevity.

[0230] Further, a synergistic effect of individual SNPs was demonstrated by exhaustively comparing significance levels for association of single SNPs with antibiotic susceptibility/resistance and significance levels for association of combinations of SNPs with antibiotic susceptibility/resistance. For a representative example of 2 SNPs the significance level for synergistic association of two SNPs was improved with the values given in Table 14 compared to the association of either SNP alone, given for exemplary different antibiotics.

TABLE 14
Synergistic increase for association of two SNPs

| | | | | | | | Improv |
|---|---|---|---|---|---|---|---|
| drug | POS 1 | Ref | Alt | POS 2 | Ref | Alt | [%] |
| CRM | 2833888 | G | A | 3379140 | C | T | 17180.9 |
| CRM | 2833888 | G | A | 3536122 | G | A | 296.8 |
| CRM | 2833888 | G | A | 1487086 | C | T | 10989.5 |
| CRM | 2833888 | G | A | 2208848 | C | A, T | 13443.8 |
| CRM | 2833888 | G | A | 3799879 | C | T | 10989.5 |
| CRM | 2833888 | G | A | 1994028 | C | T | 114.9 |
| CRM | 2833888 | G | A | 3686566 | G | A | 634.2 |
| CRM | 2833888 | G | A | 1163470 | G | T | 3919.4 |
| CRM | 2833888 | G | A | 1148509 | G | C | 3616.5 |
| CRM | 2833888 | G | A | 4478134 | A | C | 17180.9 |
| CRM | 2833888 | G | A | 56998 | A | C | 13170.2 |
| CRM | 2833888 | G | A | 46695 | G | A | 13170.2 |
| CRM | 2833888 | G | A | 25574 | T | A, G | 284.0 |
| CRM | 1313897 | C | T | 3379140 | C | T | 1944.3 |
| CRM | 1313897 | C | T | 1487086 | C | T | 1285.6 |
| CRM | 1313897 | C | T | 2208848 | C | A, T | 1620.7 |
| CRM | 1313897 | C | T | 3799879 | C | T | 1285.6 |
| CRM | 1313897 | C | T | 3686566 | G | A | 105.9 |
| CRM | 1313897 | C | T | 1163470 | G | T | 490.1 |
| CRM | 1313897 | C | T | 1148509 | G | C | 475.0 |
| CRM | 1313897 | C | T | 4478134 | A | C | 1944.3 |
| CRM | 1313897 | C | T | 56998 | A | C | 1634.2 |
| CRM | 1313897 | C | T | 46695 | G | A | 1634.2 |
| CRM | 3379140 | C | T | 855087 | C | G | 1311.3 |
| CRM | 3379140 | C | T | 4191057 | G | A, C | 623.4 |
| CRM | 3379140 | C | T | 4724403 | C | T | 1484.1 |
| CRM | 3379140 | C | T | 4436188 | A | G | 1606.9 |
| CRM | 3379140 | C | T | 4779417 | T | C | 101.0 |
| CRM | 3379140 | C | T | 546961 | G | T | 20434.1 |
| CRM | 3379140 | C | T | 3582301 | A | G | 159.4 |
| CRM | 3536122 | G | A | 1650934 | G | A | 459.3 |
| CRM | 3536122 | G | A | 1994028 | C | T | 736.2 |
| CRM | 3536122 | G | A | 4523874 | C | T | 550.8 |
| CRM | 3536122 | G | A | 3966175 | T | G | 351.5 |
| CRM | 3536122 | G | A | 258966 | G | C, T | 380.4 |
| CRM | 1487086 | C | T | 855087 | C | G | 843.8 |
| CRM | 1487086 | C | T | 4191057 | G | A, C | 349.9 |
| CRM | 1487086 | C | T | 4724403 | C | T | 2306.4 |
| CRM | 1487086 | C | T | 4436188 | A | G | 1449.8 |
| CRM | 1487086 | C | T | 546961 | G | T | 27275.0 |
| AM | 1487086 | C | T | 3582301 | A | G | 214.6 |
| A/S | 1487086 | C | T | 3582301 | A | G | 118.9 |
| CRM | 2208848 | C | A, T | 855087 | C | G | 1131.7 |
| CRM | 2208848 | C | A, T | 4191057 | G | A, C | 428.3 |
| CRM | 2208848 | C | A, T | 4724403 | C | T | 2980.5 |
| CRM | 2208848 | C | A, T | 4436188 | A | G | 1767.9 |
| CRM | 2208848 | C | A, T | 4779417 | T | C | 106.5 |
| CRM | 2208848 | C | A, T | 546961 | G | T | 37055.6 |
| AM | 2208848 | C | A, T | 3582301 | A | G | 161.4 |
| AM | 1589819 | A | G | 1163470 | G | T | 120.6 |
| AM | 1650934 | G | A | 1672517 | T | C | 112.8 |
| AM | 1650934 | G | A | 1673475 | T | C | 116.0 |
| CRM | 1650934 | G | A | 3686566 | G | A | 1163.3 |
| CRM | 1650934 | G | A | 546961 | G | T | 190.1 |
| CRM | 1650934 | G | A | 25574 | T | A, G | 1058.0 |
| AM | 1672517 | T | C | 3966175 | T | G | 352.6 |
| A/S | 1672517 | T | C | 3966175 | T | G | 245.6 |
| AM | 1672517 | T | C | 1163470 | G | T | 135.3 |
| AM | 1672517 | T | C | 258966 | G | C, T | 215.6 |
| A/S | 1672517 | T | C | 258966 | G | C, T | 131.5 |
| AM | 1673475 | T | C | 3966175 | T | G | 438.8 |
| A/S | 1673475 | T | C | 3966175 | T | G | 278.9 |
| AM | 1673475 | T | C | 1163470 | G | T | 148.6 |
| AM | 1673475 | T | C | 258966 | G | C, T | 223.5 |
| A/S | 1673475 | T | C | 258966 | G | C, T | 154.9 |
| CRM | 3799879 | C | T | 855087 | C | G | 843.8 |
| CRM | 3799879 | C | T | 4191057 | G | A, C | 349.9 |
| CRM | 3799879 | C | T | 4724403 | C | T | 2306.4 |
| CRM | 3799879 | C | T | 4436188 | A | G | 1449.8 |
| CRM | 3799879 | C | T | 546961 | G | T | 27275.0 |
| AM | 3799879 | C | T | 3582301 | A | G | 214.6 |
| A/S | 3799879 | C | T | 3582301 | A | G | 118.9 |
| CRM | 1994028 | G | T | 3686566 | G | A | 1277.0 |
| CRM | 1994028 | G | T | 25574 | T | A, G | 777.8 |
| CRM | 4523874 | C | T | 3686566 | G | A | 1353.7 |
| CRM | 4523874 | C | T | 546961 | G | T | 248.4 |
| CRM | 4523874 | C | T | 25574 | T | A, G | 1324.2 |
| CRM | 855087 | C | G | 1163470 | G | T | 383.0 |
| CRM | 855087 | C | G | 1148509 | G | C | 320.2 |
| CRM | 855087 | C | G | 4478134 | A | C | 1311.3 |
| CRM | 855087 | C | G | 56998 | A | C | 1047.0 |
| CRM | 855087 | C | G | 46695 | G | A | 1047.0 |
| CRM | 3966175 | T | G | 3686566 | G | A | 570.0 |
| AM | 3966175 | T | G | 3582301 | A | G | 299.2 |
| A/S | 3966175 | T | G | 3582301 | A | G | 153.4 |
| CRM | 3966175 | T | G | 25574 | T | A, G | 243.7 |
| CRM | 3686566 | G | A | 4779417 | T | C | 239.2 |
| CRM | 3686566 | G | A | 258966 | G | C, T | 937.7 |
| CRM | 4191057 | G | A, C | 1163470 | G | T | 137.3 |
| CRM | 4191057 | G | A, C | 1148509 | G | C | 3689.8 |
| CRM | 4191057 | G | A, C | 4478134 | A | C | 623.4 |
| CRM | 4191057 | G | A, C | 56998 | A | C | 440.7 |
| CRM | 4191057 | G | A, C | 46695 | G | A | 440.7 |
| CRM | 4191057 | G | A, C | 25574 | T | A, G | 530.9 |
| CRM | 4724403 | C | T | 1163470 | G | T | 400.4 |
| CRM | 4724403 | C | T | 1148509 | G | C | 829.0 |
| CRM | 4724403 | C | T | 4478134 | A | C | 1484.1 |
| CRM | 4724403 | C | T | 56998 | A | C | 2939.8 |
| CRM | 4724403 | C | T | 46695 | G | A | 2939.8 |
| CRM | 1163470 | G | T | 4436188 | A | G | 420.5 |
| CRM | 1163470 | G | T | 546961 | G | T | 3816.3 |
| AM | 1163470 | G | T | 3582301 | A | G | 408.7 |
| A/S | 1163470 | G | T | 3582301 | A | G | 221.9 |
| CRM | 1148509 | G | C | 4436188 | A | G | 459.2 |
| CRM | 1148509 | G | C | 546961 | G | T | 8786.6 |
| AM | 1148509 | G | C | 3582301 | A | G | 177.4 |
| A/S | 1148509 | G | C | 3582301 | A | G | 107.5 |
| CRM | 4478134 | A | C | 4436188 | A | G | 1606.9 |
| CRM | 4478134 | A | C | 4779417 | T | C | 101.0 |
| CRM | 4478134 | A | C | 546961 | G | T | 20434.1 |
| AM | 4478134 | A | C | 3582301 | A | G | 159.4 |
| CRM | 4436188 | A | G | 56998 | A | C | 1772.4 |
| CRM | 4436188 | A | G | 46695 | G | A | 1772.4 |
| CRM | 4779417 | T | C | 56998 | A | C | 101.0 |
| CRM | 4779417 | T | C | 46695 | G | A | 101.0 |
| CRM | 258966 | G | C, T | 546961 | G | T | 147.6 |
| AM | 258966 | G | C, T | 3582301 | A | G | 159.0 |
| CRM | 258966 | G | C, T | 25574 | T | A, G | 777.8 |
| CRM | 546961 | G | T | 56998 | A | C | 38427.4 |
| CRM | 546961 | G | T | 46695 | G | A | 38427.4 |
| AM | 3582301 | A | G | 56998 | A | C | 153.8 |
| AM | 3582301 | A | G | 46695 | G | A | 153.8 |

POS 1, 2 = position 1, 2 used for combination;
Ref = reference base;
Alt = alternated base in samples;
improv = improvement compared to minimum p-value of single SNP

[0231] For example, the improvement of 153.8% in the last example with positions 3582301 and 46695 for AM results from a p-value change from 2.27248e-06 to 1.4778e-06.

[0232] Again, similar results were obtained for other SNPs in respective genes.

[0233] A genetic test for the combined pathogen identification and antimicrobial susceptibility testing direct from the patient sample can reduce the time-to actionable result significantly from several days to hours, thereby enabling targeted treatment. Furthermore, this approach will not be restricted to central labs, but point of care devices can be developed that allow for respective tests. Such technology along with the present methods and computer program products could revolutionize the care, e.g. in intense care units or for admissions to hospitals in general. Furthermore, even applications like real time outbreak monitoring can be achieved using the present methods.

[0234] Instead of using only single variants, a combination of several variant positions can improve the prediction accuracy and further reduce false positive findings that are influenced by other factors.

[0235] Compared to approaches using MALDI-TOF MS, the present approach has the advantage that it covers almost the complete genome and thus enables us to identify the potential genomic sites that might be related to resistance. While MALDI-TOF MS can also be used to identify point mutations in bacterial proteins, this technology only detects a subset of proteins and of these not all are equally well covered. In addition, the identification and differentiation of certain related strains is not always feasible.

[0236] The present method allows computing a best breakpoint for the separation of isolates into resistant and susceptible groups. The inventors designed a flexible software tool that allows to consider—besides the best breakpoints—also values defined by different guidelines (e.g. European and US guidelines), preparing for an application of the GAST in different countries.

[0237] The inventors demonstrate that the present approach is capable of identifying mutations in genes that are already known as drug targets, as well as detecting potential new target sites.

[0238] The current approach enables
[0239] a. Identification and validation of markers for genetic identification and susceptibility/resistance testing within one diagnostic test
[0240] b. validation of known drug targets and modes of action
[0241] c. detection of potentially novel resistance mechanisms leading to putative novel target/secondary target genes for new therapies

1. A diagnostic method of determining an infection of a patient with Salmonella species potentially resistant to antimicrobial drug, e.g. antibiotic, treatment, comprising the steps of:
a) obtaining or providing a sample containing or suspected of containing at least one Salmonella species from the patient;
b) determining the presence of at least one mutation in at least two genes from the group of genes consisting of recN, hemH, UMN798_3428, metE, yijD, UMN798_4831, UMN798_1939, copS, UMN798_0628, UMN798_4878, leuB, recF, emrA, glyQ, dcp, thiH, UMN798_1612, UMN798_2909, UMN798_1680, UMN798_4073, yjbC, nadB, UMN798_3160, hutU, envC, UMN798_3889, UMN798_1629, bcfB, degQ, UMN798_1331, trg, uvrC, polB, hpcD, UMN798_1628, UMN798_1701, glgS, plsB, yjcC, feoB, misL, dxr, hemF, rnfG, yhjB, UMN798_1163, UMN798_0394, alkA, nhaA, and lspA, wherein the presence of said at least two mutations is indicative of an infection with an antimicrobial drug, e.g. antibiotic, resistant Salmonella strain in said patient.

2. A method of selecting a treatment of a patient suffering from an infection with a potentially resistant Salmonella strain, comprising the steps of:
a) obtaining or providing a sample containing or suspected of containing at least one Salmonella species from the patient;
b) determining the presence of at least one mutation in at least two genes from the group of genes consisting of recN, hemH, UMN798_3428, metE, yijD, UMN798_4831, UMN798_1939, copS, UMN798_0628, UMN798_4878, leuB, recF, emrA, glyQ, dcp, thiH, UMN798_1612, UMN798_2909, UMN798_1680, UMN798_4073, yjbC, nadB, UMN798_3160, hutU, envC, UMN798_3889, UMN798_1629, bcfB, degQ, UMN798_1331, trg, uvrC, polB, hpcD, UMN798_1628, UMN798_1701, glgS, plsB, yjcC, feoB, misL, dxr, hemF, rnfG, yhjB, UMN798_1163, UMN798_0394, alkA, nhaA, and lspA, wherein the presence of said at least two mutations is indicative of a resistance to one or more antimicrobial, e.g. antibiotic, drugs;
c) identifying said at least one or more antimicrobial, e.g. antibiotic, drugs; and
d) selecting one or more antimicrobial, e.g. antibiotic, drugs different from the ones identified in step c) and being suitable for the treatment of a Salmonella infection.

3. The method of one or more of the preceding claims, where the method involves determining the resistance of Salmonella to one or more antimicrobial, e.g. antibiotic, drugs.

4. The method of any one of claims 1 to 3, wherein the antimicrobial, e.g. antibiotic, drug is selected from lactam antibiotics and the presence of a mutation in the following genes is determined: recN, hemH, UMN798_3428, metE, yijD, UMN798_4831, UMN798_1939, copS, UMN798_0628, UMN798_4878, leuB, recF, emrA, glyQ, dcp, thiH, UMN798_1612, UMN798_2909, UMN798_1680, UMN798_4073, yjbC, nadB, UMN798_3160, hutU, envC, UMN798_3889, UMN798_1629, bcfB, degQ, UMN798_1331, trg, uvrC, polB, hpcD, UMN798_1628, UMN798_1701, glgS, plsB, yjcC, feoB, misL, dxr, hemF, rnfG, yhjB, UMN798_1163, UMN798_0394, alkA, nhaA, and/or lspA; and/or
wherein the antimicrobial, e.g. antibiotic, drug is selected from aminoglycoside antibiotics, and the presence of a mutation in the following genes is determined: recN, hemH, UMN798_3428, metE, yijD, UMN798_4831, UMN798_1939, copS, UMN798_0628, UMN798_4878, leuB, recF, emrA, glyQ, dcp, thiH, UMN798_1612, UMN798_2909, UMN798_1680, UMN798_4073, yjbC, nadB, UMN798_3160, hutU, envC, UMN798_3889, UMN798_1629, bcfB, degQ, UMN798_1331, trg, uvrC, polB, hpcD, UMN798_1628, UMN798_1701, glgS, plsB, yjcC, feoB, misL, dxr, hemF, rnfG, yhjB, UMN798_1163, UMN798_0394, alkA, nhaA, and/or lspA; and/or
wherein the antimicrobial, e.g. antibiotic, drug is selected from polyketide antibiotics, preferably tetracycline antibiotics, and the presence of a mutation in the following genes is determined: recN, hemH, UMN798_3428, metE, yijD, UMN798_4831, UMN798_1939, copS, UMN798_0628, UMN798_4878, leuB, recF, emrA, glyQ, dcp, thiH, UMN798_1612, UMN798_2909, UMN798_1680, UMN798_4073, yjbC, nadB, UMN798_3160, hutU, envC, UMN798_3889, UMN798_1629, bcfB, UMN798_1331, trg, uvrC, polB, hpcD, UMN798_1628, UMN798_1701, glgS, plsB, yjcC, feoB, misL, dxr, hemF, rnfG, yhjB, UMN798_1163, UMN798_0394, alkA, nhaA, and/or lspA.

5. The method of one or more of the preceding claims, wherein the antimicrobial drug, e.g. antibiotic drug, is selected from the group consisting of Amoxicillin/K Clavulanate (AUG), Ampicillin (AM), Aztreonam (AZT), Cefazolin (CFZ), Cefepime (CPM), Cefotaxime (CFT), Ceftazidime (CAZ), Ceftriaxone (CAX), Cefuroxime (CRM), Cephalotin (CF), Ciprofloxacin (CP), Ertapenem (ETP), Gentamicin (GM), Imipenem (IMP), Levofloxacin (LVX), Meropenem (MER), Piperacillin/Tazobactam (P/T), Ampicillin/Sulbactam (A/S), Tetracycline (TE), Tobramycin (TO), and Trimethoprim/Sulfamethoxazole (T/S).

6. The method of any one of claims 1 to 5, wherein the antibiotic drug is CFZ and a mutation in at least one of the following nucleotide positions is detected with regard to reference genome NC_017046 as annotated at the NCBI: 4779417, 2983118, 1548464, 1574737, 3772654, 1313897; and/or
wherein the antibiotic drug is GM and a mutation in at least one of the following nucleotide positions is detected with regard to reference genome NC_017046 as annotated at the NCBI: 2840330, 25574, 3536122, 115342, 1148509, 3379140, 4478134, 3686566, 1487086, 3799879, 1163470, 2208848, 46695, 56998, 3335426; and/or
wherein the antibiotic drug is CF and a mutation in at least one of the following nucleotide positions is detected with regard to reference genome NC_017046 as annotated at the NCBI: 2833888, 546961, 3334479, 4191057, 4366486, 4724403, 1895588, 1139812, 637461, 4779417, 131219, 4062015, 2983118, 3861998, 1548464, 4397111, 1574737, 1650934, 4436188, 3075942, 855087, 3582301, 3772654, 1590194, 1313897, 1673475, 1994028, 1589819, 1672517, 3976726 3582354, 1673444; and/or
wherein the antibiotic drug is TE and a mutation in at least one of the following nucleotide positions is detected with regard to reference genome NC_017046 as annotated at the NCBI: 2833888, 546961, 3334479, 4191057, 4366486, 4724403, 1895588, 1139812, 637461, 4779417, 131219, 4062015, 2983118, 3861998, 1548464, 4397111, 1574737, 2840330, 1650934, 3966175, 4436188, 2780306, 3075942, 855087, 3582301, 3772654, 1590194, 25574, 1313897, 1673475, 1994028, 115342, 1148509, 1589819, 1672517, 3379140, 4478134, 4523874, 3686566, 3976726, 258966, 2558379, 1487086, 3799879, 1163470, 409259, 2208848, 46695, 56998, 3582354, 3335426, 1673444; and/or
wherein the antibiotic drug is A/S and a mutation in at least one of the following nucleotide positions is detected with regard to reference genome NC_017046 as annotated at the NCBI: 2833888, 546961, 3334479, 4191057, 4366486, 4724403, 1895588, 1139812, 637461, 4779417, 131219, 4062015, 2983118, 3861998, 1548464, 4397111, 1574737, 2840330, 1650934, 3966175, 4436188, 2780306, 3075942, 855087, 3582301, 3772654, 1590194, 25574, 3536122, 1313897, 1673475, 1994028, 115342, 1148509, 1589819, 1672517, 3379140, 4478134, 4523874, 3686566, 3976726, 258966, 2558379, 1487086, 3799879, 1163470, 409259, 2208848, 46695, 56998, 3582354, 3335426, 1673444; and/or
wherein the antibiotic drug is CRM and a mutation in at least one of the following nucleotide positions is detected with regard to reference genome NC_017046 as annotated at the NCBI: 2833888, 546961, 3334479, 4191057, 4366486, 4724403, 1895588, 1139812, 637461, 4779417, 131219, 4062015, 2983118, 3861998, 1548464, 4397111, 1574737, 2840330, 1650934, 3966175, 4436188, 2780306, 3075942, 855087, 3582301, 3772654, 1590194, 25574, 3536122, 1313897, 1673475, 1994028, 115342, 1148509, 1589819, 1672517, 3379140, 4478134, 4523874, 3686566, 3976726, 258966, 2558379, 1487086, 3799879, 1163470, 409259, 2208848, 46695, 56998, 3582354, 3335426, 1673444; and/or
wherein the antibiotic drug is P/T and a mutation in at least one of the following nucleotide positions is detected with regard to reference genome NC_017046 as annotated at the NCBI: 2833888, 546961, 3334479, 4191057, 4366486, 4724403, 1895588, 1139812, 637461, 4779417, 131219, 4062015, 2983118, 3861998, 1548464, 4397111, 1574737, 2840330, 1650934, 3966175, 4436188, 2780306, 3075942, 855087, 3582301, 3772654, 1590194, 25574, 3536122, 1313897, 1673475, 1994028, 115342, 1148509, 1589819, 1672517, 3379140, 4478134, 4523874, 3686566, 3976726, 258966, 2558379, 1487086, 3799879, 1163470, 409259, 2208848, 46695, 56998, 3582354, 3335426, 1673444; and/or
wherein the antibiotic drug is TO and a mutation in at least one of the following nucleotide positions is detected with regard to reference genome NC_017046 as annotated at the NCBI: 2833888, 546961, 3334479, 4191057, 4366486, 4724403, 1895588, 1139812, 637461, 4779417, 131219, 4062015, 2983118, 3861998, 1548464, 4397111, 1574737, 2840330, 1650934, 3966175, 4436188, 2780306, 3075942, 855087, 3582301, 3772654, 1590194, 25574, 3536122, 1313897, 1673475, 1994028, 115342, 1148509, 1589819, 1672517, 3379140, 4478134, 4523874, 3686566, 3976726, 258966, 2558379, 1487086, 3799879, 1163470, 409259, 2208848, 46695, 56998, 3582354, 3335426, 1673444; and/or
wherein the antibiotic drug is AM and a mutation in at least one of the following nucleotide positions is detected with regard to reference genome NC_017046 as annotated at the NCBI: 2833888, 546961, 3334479, 4191057, 4366486, 4724403, 1895588, 1139812, 637461, 4779417, 131219, 4062015, 2983118, 3861998, 1548464, 4397111, 1574737, 2840330, 1650934, 3966175, 4436188, 2780306, 3075942, 855087, 3772654, 25574, 3536122, 1313897, 1994028, 115342, 1148509, 3379140, 4478134, 4523874, 3686566, 3976726, 258966, 2558379, 1487086, 3799879, 1163470, 409259, 2208848, 46695, 56998, 3335426; and/or
wherein the antibiotic drug is AUG and a mutation in at least one of the following nucleotide positions is detected with regard to reference genome NC_017046 as annotated at the NCBI: 2833888, 546961, 3334479, 4191057, 4366486, 4724403, 1895588, 1139812, 637461, 4779417, 131219, 4062015, 2983118, 3861998, 1548464, 4397111, 1574737, 2840330, 1650934, 3966175, 4436188, 2780306, 3075942, 855087, 3582301, 3772654, 1590194, 25574, 3536122, 1313897, 1673475, 1994028, 115342, 1148509, 1589819, 1672517, 3379140, 4478134, 4523874, 3686566, 3976726, 258966, 2558379, 1487086, 3799879, 1163470, 409259, 2208848, 46695, 56998, 3582354, 3335426, 1673444.

7. The method of any one of claims 1 to 6, wherein the resistance of a bacterial microorganism belonging to the species Salmonella against 1, 2, 3, 4, 5, 6, 7, 8, 9, 10, 11, 12, 13, 14, 15 or 16, 17, 18, 19, 20 or 21 antibiotic drugs is determined.

8. The method of one or more of the preceding claims, wherein determining the nucleic acid sequence information or the presence of a mutation comprises determining a partial sequence or an entire sequence of the at least two genes.

9. The method of one or more of the preceding claims, wherein determining the nucleic acid sequence information or the presence of a mutation comprises determining a partial or entire sequence of the genome of the Salmonella species, wherein said partial or entire sequence of the genome comprises at least a partial sequence of said at least two genes.

10. The method of one or more of the preceding claims, wherein determining the nucleic acid sequence information or the presence of a mutation comprises using a next generation sequencing or high throughput sequencing method, preferably wherein a partial or entire genome sequence of the bacterial organism of Salmonella species is determined by using a next generation sequencing or high throughput sequencing method.

11. A method of determining an antimicrobial drug, e.g. antibiotic, resistance profile for bacterial microorganisms of Salmonella species, comprising:
obtaining or providing a first data set of gene sequences of a plurality of clinical isolates of Salmonella species;
providing a second data set of antimicrobial drug, e.g. antibiotic, resistance of the plurality of clinical isolates of Salmonella species;
aligning the gene sequences of the first data set to at least one, preferably one, reference genome of Salmonella, and/or assembling the gene sequence of the first data set, at least in part;
analyzing the gene sequences of the first data set for genetic variants to obtain a third data set of genetic variants;
correlating the third data set with the second data set and statistically analyzing the correlation; and
determining the genetic sites in the genome of Salmonella associated with antimicrobial drug, e.g. antibiotic, resistance.

12. A diagnostic method of determining an infection of a patient with Salmonella species potentially resistant to antimicrobial drug treatment, comprising the steps of:
a) obtaining or providing a sample containing or suspected of containing a bacterial microorganism belonging to the species Salmonella from the patient;
b) determining the presence of at least one mutation in at least one gene of the bacterial microorganism belonging to the species Salmonella as determined by the method of claim 11, wherein the presence of said at least one mutation is indicative of an infection with an antimicrobial drug resistant Salmonella strain in said patient.

13. A method of selecting a treatment of a patient suffering from an infection with a potentially resistant Salmonella strain, comprising the steps of:
a) obtaining or providing a sample containing or suspected of containing a bacterial microorganism belonging to the species Salmonella from the patient;
b) determining the presence of at least one mutation in at least one gene of the bacterial microorganism belonging to the species Salmonella as determined by the method of claim 11, wherein the presence of said at least one mutation is indicative of a resistance to one or more antimicrobial drugs;
c) identifying said at least one or more antimicrobial drugs; and
d) selecting one or more antimicrobial drugs different from the ones identified in step c) and being suitable for the treatment of a Salmonella infection.

14. A method of acquiring an antimicrobial drug, e.g. antibiotic, resistance profile for bacterial microorganisms of Salmonella species, comprising:
obtaining or providing a first data set of gene sequences of a clinical isolate of Salmonella species;
providing a second data set of antimicrobial drug, e.g. antibiotic, resistance of a plurality of clinical isolates of Salmonella species;
aligning the gene sequences of the first data set to at least one, preferably one, reference genome of Salmonella, and/or assembling the gene sequence of the first data set, at least in part;
analyzing the gene sequences of the first data set for genetic variants to obtain a third data set of genetic variants of the first data set;
correlating the third data set with the second data set and statistically analyzing the correlation; and
determining the genetic sites in the genome of Salmonella of the first data set associated with antimicrobial drug, e.g. antibiotic, resistance.

15. Computer program product comprising computer executable instructions which, when executed, perform a method according to any one of claims 11 to 14.

The application's sequence listing, which the Patent Office published only in electronic form, follows.

SEQUENCE LISTING (1 sequence)

SEQ ID NO: 1 - DNA, 4876219 bp, Salmonella enterica subsp. enterica serovar Typhimurium str. 798 (residues 1-1,625,407 of 4,876,219)
agagattacgtctggttgcaagagatcatgacagggggaattggttgaaaataaatatatcgccagcagcacatgaacaagtttcggaatgtgatcaatttaaaaatttattgacttaggcgggcagatactttaaccaatataggaatacaagacagacaaataaaaatgacagagtacacaacatccatgaaccgcatcagcaccaccaccattaccaccatcaccattaccacaggtaacggtgcgggctgacgcgtacaggaaacacagaaaaaagcccgcacctgaacagtgcgggcttttttttcgaccagagatcacgaggtaacaaccatgcgagtgttgaagttcggcggtacatcagtggcaaatgcagaacgttttctgcgtgttgccgatattctggaaagcaatgccaggcaagggcaggtagcgaccgtactttccgcccccgcgaaaattaccaaccatctggtggcaatgattgaaaaaactatcggcggccaggatgctttgccgaatatcagcgatgcagaacgtattttttctgacctgctcgcaggacttgccagcgcgcagccgggattcccgcttgcacggttgaaaatggttgtcgaacaagaattcgctcagatcaaacatgttctgcatggtatcagcctgctgggtcagtgcccggatagcatcaacgccgcgctgatttgccgtggcgaaaaaatgtcgatcgcgattatggcgggacttctggaggcgcgtgggcatcgcgtcacggtgatcgatccggtagaaaaattgctggcggtgggccattaccttgaatctaccgtcgatatcgcggaatcgactcgccgtatcgccgccagccagatcccggccgatcacatgatcctgatggcgggctttaccgccggtaatgaaaagggtgaactggtggtgctgggccgtaatggttccgactattccgccgccgtgctggccgcctgtttacgcgctgactgctgtgaaatctggactgacgtcgatggcgtgtatacctgtgacccgcgccaggtgccggacgccaggctgctgaaatcgatgtcctaccaggaagcgatggaactctcttacttcggcgccaaagtccttcaccctcgcaccattacgcccatcgcccagttccagatcccctgtctgattaaaaataccggtaatccgcaggcgccaggaacgctgatcggcgcgtccagcgacgatgataacctgccggttaaagggatctctaaccttaacaacatggcgatgtttagcgtctccggcccgggaatgaaagggatgattgggatggcggcgcgtgttttcgccgccatgtctcgcgccgggatctcggtggtgctcattacccagtcctcctctgagtacagcatcagtttctgtgtgccgcagagtgactgcgcgcgtgcccgccgtgcgatgcaggatgagttctatctggagctgaaagaggggctgctggagccgctggcggttacggagcggttggcgattatctctgttgtcggcgacggtatgcgcacgctacgcggcatttcagcgaaattcttcgccgcgctggcgcgggctaatatcaatatcgtggcgatcgctcagggatcttctgagcgttctatttctgtggtggtgaataacgacgatgccaccaccggcgtgcgggtaacgcaccagatgctgttcaataccgatcaggtgattgaagtgtttgtcattggcgtcggcggcgtcggcggcgcgctactggaacagcttaaacgtcagcaaacctggctgaagaacaagcacatcgatctacgcgtgtgcggcgtggcgaactcaaaggcgttgctaaccaatgtgcatggcctgaatctggacaactggcaggcggaactggcgcaagcgaacgcgccgttcaatctgggacgcttaattcgcctggtgaaagaatatcatctactcaatccggtgattgttgattgtacctccagtcaggcggtggccgaccagtatgccgacttcctgcgtgaagggttccatgtggtgacgccaaacaagaaagcgaacacctcgtcaatggactactaccatcagctacgtttcgccgccgcgcaatcacggcgcaaattcttgtatgacaccaacgtcggcgccggtttgccggtaatcgaaaacctgcaaaacctgctgaatgccggtgatgaactgcaaaaattttccggcattctttccgggtcgctctcttttattttcggtaaactggaagaggggatgagtctctcacaggcgaccgccctggcgcgcgagatgggctataccgaacccgatccgcgcgacgatctttccggtatggatgtggcgcgtaaactgttgatcctcgcccgcgagacgggccgcgagctggagctttccgatattgtgattgaaccggtgttgccgaacgagtttgacgcctccggcgatgtgaccgcctttatggcacatctgccgcagcttgacgacgcgtttgccgcccgtgtggcgaaagctcgtgatgaaggtaaggtattgcgctatgtgggcaatatcgaagaggatggcgtgtgccgcgtgaaaattgccgaagttgatggtaacgatccgctcttcaaagtgaaaaacggtgaaaacgcgctggcgttctacagccactattatcagcccttgccgttggtgctgcgcggctacggcgcaggcaatgatgtgacggcggcgggcgtgtttgccgatctgttacggaccctctcatggaagttaggagtttaacatggtgaaagtgtatgccccggcttccagcgcgaacatgagcgtcggtttcgacgtgttgggcgcagccgtcacacccgttgacggcacgttgctgggcgatgtggtatccgttgaagcagcggaccatttccgtctgcataacctggggcgatttgccgataaactgccgccggagccgcgtgaaaatattgtttatcagtgctgggaacgtttttgccaggcattggggaaaaccatcccggtggcgatgacgctggaaaaaaatatgccgattggttccgggttagggtccagcgcctgttccgtcgtcgccgcgctggtcgcgatgaatgagcactgcggcaaaccgttaaacgacacgcgtctgttggcgctgatgggcgagctggaaggccgtatctccggcagcatccattacgataacgtcgcgccgtgctttcttggcggtatgcagttgatgattgaagaaaacggcattattagtcagcaggtgccgggctttgatgagtggctatgggtactggcttatccgggcattaaagtttctaccgcagaagcacgggccattttgcctgcgcagtatcgccgtcaggattgcattgcgcatggacggcatctggccggttttattcacgcctgttactcgcggcagccgcagcttgccgccgcgctgatgaaagatgttattgccgaaccataccgcgcgcgtttactgccgggctttagccaggcgcggcaggcggtgtcggagatcggcgcgctggcgagcgggatttccgggtcggggccgacgctgtttgcgctatgcgataaaccggagacggcgcagcgcgtcgcggactggctgagcaaacattatctgcaaaatcaggaaggcttcgttcatatttgccggctggatacggcgggcgcacgagtagtgggataatcaatgaaactctataatctgaaagaccataatgagcaggtcagctttgcgcaggccgtcacgcaaggactgggcaaacagcagggacttttttttccgcacgatctgccggagtttagcctgacggaaattgatgagatgctcaaccaggactttgtcagccgtagcgcaaagatcctctcggcatttattggcgatgaaataccgcagcaaattctggaagagcgcgtccgcgcggcgtttgcgttcccggcaccggtagcgcaggtagaaagcgatgtcggctgcctggagctgttccatggtccgacgctggcctttaaagacttcggcgggcgttttatggcgcaaatgctgacgcatatcagcggcgacaaaccggtgacgattctgactgcaacgtcaggcgataccggcgcggcggtggctcacgcgttctatggcctggaaaatgtgcgggtcgtcattctctacccgcgcggtaagatcagtccgttgcaggaaaaactgttctgtacgctgggcggcaacattgaaaccgtggcgatcgacggcgatttcgacgcgtgccaggcgctggtgaaacaggcatttgatgacgaagaactgaaaacggcgctggggctgaattcggctaattcgattaatatcagccgcctgttggcgcaaatttgctactactttgaagccgtggcgcaactgccgcagggggcgcgtaaccaactggtgatctccgtccccagcggcaactttggcgatttgacggcagggctgctggcgaagtcgttaggcctaccggtgaaacgttttatcgccgccaccaacgtcaacgacacggtgccgcgttttctgcatgacggaaagtgggcgccgaaagcgacgcaggcgaccctgtcgaatgcgatggatgtcagccagccgaataactggccgcgcgtggaggagctattccgccgtaaaatctggcgcctgactgagctgggctatgcggcggtggatgatactacgacacagcagacgatgcgcgagctgaaagcgaaaggttatatctcggaacctcatgcggcggtagcgtatcgggcattacgcgaccagttaaaccctggcgagtatggcttgtttctcggaacggcgcatccggcgaagtttaaagagagcgtggagtccattctgggagaaacgctggccttgcctgaagcgctcgccgaacgcgccgacctgccgctgctttcacatcatctgcctgcggattttgccgccctgcgtaagctgatgatgacccgccaataaccattgcgcccggtggcgctgtcgcttaccgggcctatggggtggtgtcgatttgtaggccggataaggcgtaaccgccatccggcgatgccgttactgctcgtagcgtttaaagaccagctcgtcttgtgtggaggtttcttcatcaaagaaatacccttcacggtcaaacgcggtaagctgttccggcttcgttaagcggttttcaataataaaacggctcatcagtccgcgcgcttttttggcgtagaagcttaccaccttaaacttgccgtttttctcatcaaggaacacgggcttaatcagttcggcattcagtttcttcggcttcaccgatttaaaatattcctcggaggccagattcaccaccacccgatcgccctgcgcctcaagcgcttcgttgagcttatcggtaatgatatcgccccagaattgataaagatctttgccgcgcggattctccaggcgaatccccatctccagacgataaggctgcattaaatccagcgggcgcaatacgccatacaagccagagagcatacgcagatgttgttgagcaaaatcaaaatccgcgtcgttgaacgtttccgcctgtaggccggtataaacatcgcctttgaacgccagaatcgcctggcgtgcattatccggcgtaaaatgaggctgccagtcatgaaaacgcgtggcgttgagatccgccagtttgtcgctaattcccatcagcctggaaatttgcggcgccgaaagctggcgggcctgttgaataagctgctggctgtgatccaacagctccggctgggtatagcgggtcgtggccagcgggctttgataatcaagcgtttttgcaggtgaaatcagaatcagcatattcagtccttgcagggaattttctgcgactttagcaaaaaaacgccgcagagttgaccgatggttgcgattgtcggcttaatcgcgcgatgccgcctcccaggtatctggcgccagttgtggttcgatatccgggaagcgccgcggatcgaactgcggtcttacgcccagtttccgttgtcgcagataatcgctggcgagggtatacaccaccggtgagagcaacaaaatcgccgtcagattggtaatggccatacaggccatgatcatgtcagcgagctgccatatcagcggaaaactgataagcgtaccggcgataaccatgccaagcgtcgcaaggcgtaatagccagatagcctttgcgttatgtaaccgcagaaaaaacagattgttttcggcgtaaatatagttggcgacgatagaactgaacgcgaacagaatgacgataagcgcgacaaaactggcgccccattcaccggtcaacgaaaccattgcatgttggagaagctgaatgccttctgttgacgagtgggacgcgtgattccccgccagcaggataatcatcgcgctggcggtacagatgataatggtgtcgctgaatacgccaatcatttgcacaatcccctgcgcgacagggtgagggggatacgacgttgccgctgcggccgcattaggcgttgaccccattcccgcttcattagagaacatcccacgctgaaaaccgctggtaatagcctgggtgagcgtatatccggctgcgcctgccgcggcttcctgccagccaaatgcgcttttgactatcgaggcgataacgccaggcatttgctcaatatgccagaggcaaatgaatacgctgccggcgacccacaataacgcgatgaggggaatcagccattgcatcagacgggcgacgcctttgatgccgcgaatgataattaacagggcacagaacgccagagcaatgccggagataagcggcggaatgttgaaggcgaaatggagcgcgcgtgagacggcattcgcctgcacgctattaaaaatcaacccgtaggcgacgagcagaaagagggcgaaaaccacgcccatccagcgcattcccagcccacgcgccatataccacgccgggccgccgcggaactggcctgtcgggtcacgttctttataaagctgggcaagcgaacactcggcgaaggaggtcgccatgccaatgatggccgagacccacatccagaataccgcgccgggaccgcctgcggcgatagccagcgccacgccggccaggttaccgctgccaatccgcgccgcgaggctggtacacagagcctgaaatgacgtcaggccgcctggctgcgggctaaggctgcctttcagactgcggctaaattggcgaatataacgaaactgaatgaatccggtacgccaggtaaaccaacatcctgcgccgagcagcaggtaaatcattaccgagccccagagtatttcgttaataaaactgaaaaactcaggcattaacgtccctcttgttgatgccggcacgctttgataatcctgtataagcgtgacccatgatgtagatgaccttgtcagactaatattaacggcagtttaccataaatacggtggtatcctttaattgcgcatcaaccgtcggcagatacgcaaacagtgcacaagggcagccaggtgcatgtaggcggttgcgctgtgagtgcgtcgtgttatcatcagggtagaccggttacatcccctaacaagctgtttaaagagaaactctatcatgacggacaaattgacctcccttcgtcagttcaccaccgtagtggctgataccggagatatcgcggcaatgaaactgtatcagccgcaggatgctacaactaacccttctctcattcttaacgcagcgcaaatcccggaatatcgtaagctgattgacgatgctgtcgcctgggcgaaacagcagagcagcgaccgcgcgcagcaggttgttgacgcgaccgataagctggcggtgaatattggcctggagatcctgaagctggtgccggggcgtatttctaccgaagttgacgcgcgtctgtcttatgacactgaagcgtctatcgccaaagcaaaacgtatcattaaactctacaatgatgcgggtatcagcaacgatcgtatcctgatcaagctggcgtccacctggcagggcattcgtgcagccgaacagctggaaaaagaaggcatcaactgtaacctgacgctgctgttctccttcgcgcaggcgcgtgcgtgcgccgaagcgggcgtctacctgatctcgccgttcgtaggtcgtattcttgactggtataaagccaataccgacaagaaagactatgcgccagctgaagatccgggcgtggtttccgtaacggaaatctacgagtactacaaacagcatggttacgaaaccgtcgttatgggcgcaagcttccgtaacgtaggcgaaattctggagctggcgggctgcgaccgtctgactatcgcgccggcattgctgaaagaactggcggaaagcgaaggggcgattgagcgtaagctctctttctccggcgaagtcaaagcgcgcccggaacgcattaccgaagccgagttcctgtggcagcatcaccaggaccccatggcggttgacaaactggcggatggtatccgtaagtttgcggtagaccaggaaaaactggaaaaaatgatcggcgatctgctgtaatcattaacgcgtggccctgatatgggtcacgctacctcttctgaaacctgtctgtccttcccttcgcagtgtatcattctgtttaacgagactgtttaaacggaataatcatggataccttacgtattggcttagtttctatctccgaccgcgcttcaagcggcgtttaccaggataaaggcattcctgcgcttgaggagtggctcgcttctgcgctgaccacgcctttcgaggtccaacggcgcttaattcctgatgaacaggaaattatcgagcaaacgttgtgtgaactggtcgatgagatgagctgtcatctggtgctgaccactggcggtaccggtccggcgcgtcgcgacgtcacgccggacgcgacccttgccatcgccgaccgtgaaatgccaggttttggcgagcagatgcgccagatcagcctgcgctttgtgccgaccgccattctttcccgccaggtgggcgttatccgtaaacaggcgttaattcttaatctgcctggacagccaaaatcgatcaaagaaacgctggaaggcgtaaaagcggacgatggcagcgttagcgtgccgggcatttttgcgagcgtgccgtattgcatacagctgcttgacgggccgtatgtcgaaaccgcgccggaagtggttgccgctttccgtccaaagagcgccagacgtgagaatatgtcggactgaccggaaaatactgatagtagggttattcctcccggtgcgggaggaataaaagagatttagtgcgcctcgccgattggcagaatagtgcggccaaattgctcgtttagcacttcacccatcgccagataaatagcgctggcgccgcaaaccagaccaacccagcctgcgatatggatagttgcttcgttaccggtgatattgccgaccgccagcagagcgaacagtacggtcaggctcaggaaaacaaattgcagcgcgcgggcggctttcagcgtaccgaagaacataaacagcgtgaacacgccccacagacctaaataagcgccgagtagctgagcgtcaggcgcatccgtcagacccattttcggcatcagcaggatagcgaccagcgtcagccagaacgaaccgtaagaggtaaaggccgttaaaccaaaggtattgccttttttgtactccagcagaccggcaaaaatttgcgcgataccgccgtagaaaatccccatcgccagaataataccgtccagggcgaaaaaaccggcattgtgcaggttaagcagaatggtggccatgccgaagcccatcaggcccagcggtgccggattagccaacttagtgttgcccataattcctcaaaatcatcataattgaatggtgaaatagtttcccagaataacgagttccgtattcggggcgcggcataataatcagggggaagaggactgtctatgatctaataagggggaaaagaaaatatttcccccagtgagggcattcacgcctgaacggctgccatcattcgtcgcaggcaggctatttgcaagaccgccggaatagtcacgcgatacgcgctgccgctcatcgctttgacgccgtttaacgccgcgccgaccgggccgccaagacctgcgccgcgcagcaatccgtggcccaggatgctcattgcggcatgggtacgcaaaatgcgggtaagctgggtggaaagcaggtgggagaccccttttgccagactgcgatctttcatgagcagcggcagcagttcttccagttcagaaactttggcgtctacggcttgcagaaattcctgcttatgcgccgcgtccatcttctgccaggtatgacgtaaaaaatgctccagcagttgctgttctatttcaaacgtcgacatgcttttatctgctttgagttttagccgttttgcgacatccagcagaatcgcgcggtactgttttccgtgtccgcgcaatttgttggcgatactgtcgccgccgtaatgctgaaactcgccggcaatgagctgccagttacggcggtgttgctccgggtgaccttccatcgctttgaacagctcgttatggctaagaacgctcgacaagcgagctttgcccttttcgttatgcgtcagcaaacgggcgaaatcggcgagttgttcttcgctacaatgctgaagaaagtctaaatcctcgtcgtgtaaataggtgacgttcattttcagtctggcttttggaatagaaataacagcgattaatcgtcgccaatgactttaagtctcgccatatcggaagaatttaccgtatggcctgagaaggtaatctttgatacgcagcgtttgttgtcgttatcgctattaatattgatccagcctgttgtctggccctctttgattgaggaagggacgttcaggctttggctggcgctacgcgcagttttaaaatagacggatgcgccgctaagttcgatgtcgccgtgatccgccgtgagttgaatgcgcttcacgatgcggcagacgggaattttcagcgtgagatcgttcgtttcatttctgggcatggcaataacacccagtattttatggtcgttcgcgtgcgcgacgctacttaacgccaggccgaaaagcaggccgacggaaatcgttaacacagatcgcatggaatttctctttgacgggttcaataagcaataccgtctatcatactctgctcatggcaacgattcagttttgtaatcttttctttttattacaatttttctgtgaatggtattcgttatttaatttatttcatgaatatttatctgtctggttttccatcgtgccctctcgtcactaaaaaattttttcatctcccccttgatgacgtgggttacgaccccatcttgtagtcaaccgcagtggtgagtctgaaaaaaaacgattcagggtagttgaaaccgcacgtttcgcccttattacagattcacaaccacatgatgaccgaatttttagtggagacgtttagatgggtaaaattattggtatcgacctgggtactaccaactcttgtgtagcgattatggatggaacgcaggcacgcgtgctggagaacgccgagggcgatcgcactacgccttctatcattgcttatacccaggatggtgaaactctggttggtcagccggctaaacgtcaggcagtgacaaacccgcaaaacaccctgtttgcgattaaacgcctgattggccgccgcttccaggacgaagaagttcaacgtgacgtttctatcatgccgtacaaaatcatcggcgccgacaacggcgacgcatggcttgatgtgaaaggtcagaaaatggcgccgccgcagatttctgccgaagtgctgaagaaaatgaagaaaacggctgaagattatctgggcgaaccggtaactgaagcggttatcaccgtaccggcttactttaacgatgcgcagcgtcaggcaaccaaagatgctggtcgtatcgcggggctggaagttaaacgtatcatcaacgaaccgactgccgcagcgctggcttacggtctggataaagaagtcggcaaccgtactatcgcggtttacgacctcggtggtggtactttcgatatctctattatcgaaatcgacgaagttgatggcgaaaaaacctttgaagttctggcaaccaacggtgatacccacctgggtggtgaagacttcgatacccgcctgatcaactacctcgttgacgagtttaagaaagatcagggcattgacctgcgtaacgatccgctggctatgcagcgcctgaaagaagccgcagaaaaagccaaaatcgagctgtcttctgcgcagcagaccgacgtgaacctgccgtacattaccgcagatgccaccggtccgaaacacatgaacatcaaagtgactcgtgcgaaactggaaagcctggttgaagatctggtgaaccgttctatcgagccgctgaaagtcgcactgcaggacgctggcctgtccgtgtctgatatcaacgacgtgatcctcgttggcggtcagacccgtatgccaatggtgcagaaaaaagtggctgagttctttggtaaagagccgcgtaaagacgttaacccggacgaagctgtggctatcggcgcagcggtacagggcggcgtgttgaccggtgatgtgaaagacgtactgctgctggacgttaccccgctgtctctgggtatcgaaacgatgggtggcgtgatgactccgcttatcaccaaaaacaccaccatcccgaccaagcacagccaggtgttctctactgcggaagacaaccagtctgcggtaaccatccatgtgctgcagggtgagcgtaagcgtgcgtctgataacaaatctctgggtcagttcaacctggatggcatcaacccggcgccgcgcggtatgccgcagatcgaagtcaccttcgatatcgatgctgacggtatcctgcacgtctccgcgaaagataaaaatagcggtaaagagcagaagatcactatcaaggcgtcttctggtctgaacgaggaagaaattcagaaaatggttcgcgatgcagaagcgaacgctgaatccgaccgtaagttcgaagagctggttcagacccgtaaccagggcgaccatctgctgcacagcacccgtaagcaggttgaagaagcaggcgataaactgccggctgatgacaaaaccgctatcgagtctgccctgaacgcgctggaaactgccctgaaaggcgaagataaagccgctatcgaagcgaaaatgcaggaactggcgcaggtttcccagaaactgatggaaatcgctcagcagcaacatgcgcagcagcaggctggctccgctgacgcttctgcaaacaacgcgaaagatgacgacgttgtcgacgctgagtttgaagaagtaaaagataaaaaataatcgccctttgaacgggtaattactggcacgggcgaagaggtttcctctccgcccgtgtatgcatgttaagggcagataaaaagagatggcgaaaagagattactacgagattttaggcgtttccaaaacagcggaagagcgtgaaatcaaaaaggcgtataagcgcctggccatgaaatatcatccggaccgcaatcagggtgataaagaggccgaagctaagtttaaagagattaaagaagcctacgaagtgctgaccgatgcgcaaaaacgcgcagcctacgatcagtatggtcacgccgcgtttgaacaaggcggtatgggcggcggatttggcggcggctttaatggcggcgctgatttcagtgatatctttggtgacgtttttggcgatatctttggcggcgggcgtggtcgccaacgtgcggcgcgtggggctgatttgcgttataacatggatctcaccctggaagaagcggtgcgtggcgtgaccaaagagatccgtattccgacgctggaggagtgcgacgtttgccacggcagcggcgcgaaagctggcacgcaaccgcaaacctgtccgacctgtcatggttctggtcaggtacagatgcgccagggattctttgctgtacagcagacctgcccacactgtcagggacgcggtacgctgatcaaagatccgtgccataaatgtcacggtcatgggcgtgttgaaaagagtaaaactctgtccgttaaaatcccggcgggcgtggataccggcgatcgtattcgtctggcaggcgagggcgaagcgggcgagcatggcgcaccggcaggcgacttgtacgttcaggtccaggtgaaacaacaccctattttcgagcgtgaaggcaataatctttattgcgaagtgccgatcaactttgcgatggcggcgctcggcggtgaaattgaagtgccgacgttagatggtcgcgtgatgctgaaagtaccgagcgaaacacaaacgggcaagctgttccgtatgcgcggcaaaggcgtgaagtccgtacgcggtggcgcgcagggcgatttgctgtgccgtgtggtagttgaaacgccggtcggtctgagcgaaaaacagaagcaattgctaaaagatcttcaggaaagttttggcggcccgacgggagagaaaaacagcccgcgttcaaaaagcttctttgacggcgtgaaaaaattctttgacgatttgactcgctaatcttttcccgttgtatttttcttcagcccgggtgtatatccgggcttttttctgcctgtacgcgcccaggcttctgttaaacgcatcgtatcctctcatttgttgatattttgtttttactgataaacaaattgatgttaatcagcagttttgtatacgcttattctttaaaaaaacgtgatgtgatgacattaatgattgcttttttagatgctgtgaattgatttatcttgagtattatctatattgctttttttagtttccggaggcagacagcgaatgggatcgaaaggtgccaacaagagctttgattataatttaatcaaaattcttgacgctgttattttgtcaggaaatgcggctatggcggcaaaaaagttaggcattacaccggctgccgtttctctggcgttaaagcgcctgcagagttattacccggaggaactgtttagcagagggaaaggcgggctcatccccacagctaaggctgtcgacattcaccaaaatttcagtcaggtgatgaaactggtggatgatacatttctctgtaatagcaaaaaagatgaagcgttccagataacgttattaggcagtgatattgttgaaagctattatctttctcagctctataacagcgatatatttgaccgtattttgataaatcatttctccgtaagaaatatgagtcgggagcatatcagcgaacttctgtttactgcgcaaggcgatctgttgattagtgccgaacctttgctggagtccggcatagagaatcaaatcattgatagttttaaatcatttgtttgtatctgcagcagtaaacacatgctgagtaccctctcacaactgtcgctacatcatttttattcttcgcgtcatgcgttatatcagccggggatgggggcttcagtgatatatcatgatagcgaattatttaaggatgatctttactatactggcaggcgtattgtcggctatcgcagtgattcgcttaacggtttgatgagcatgatcgaacgaacctcattgattgcattgatgcctttgaaattagcgcttttttataaaaatcatcgtaaatatgacattaaatttattcagcctccgcccgaactggctttgaagtcagttcaggtctatgcatcctggaataaaaatagtagaaatatatcgacgattaatgagatggtaagtatgttacaaacactttcctccttccgtcgctaatacacctcatttttacgctttgatttaatatggttttaaatgatgtgctttgatttttaccctcctgacagggcgcttacactccttgtgttaattattcatttataatgatttcggagtgttaaaatgtctattcccaaccatgtgtcgacaacggaagttgtgctattggagctagagatcttactcactattatttcgattggcgcgtggggaggctttgtcagctatcttttacgcaaagataagacagaatataatagttctcatgaaagtattaaatattgcttaacgcagatcgtgatttcctgcttcaccagtttcttgttaagcgcgattgcgatcgaaaaagaatgcagtttcaacattgttctgttggcggcaggcttaggcggtgttttcgcgagtccgatcttaaagattcttgggcggcggattaaaaaaattatcgaaggtaataattcagattaattatcatttgcagtatcaggctcatccgtgagccttttacgcgtcttttttcagcctggtctaggtcactctattcttgatccagccataaataaattgttcgttattgtggtttttctcagcaacgtttaagtagtacgtgccctgactgcaattgagggctttcaccaaaacggcttccccttcctggcctcgccaggccaaataatgttcgagagcggcaagcgtccgcgggccaatattgccatccacatgaatatccgggtagcgtttaccttcgtgattaaagacgttcaaccagcgttgcagccacgcgctggggtggtaagcgcctatgttgactgccgcatcgcacagctcgaaggagactggccacgatagcgtcgagatgacgtcaaaacctggttttatccagtaatcctcttcgagaatcgcgtaggcttcagcgtgggtcagatcccgcatatcgccagcatagccatgcgctcgcgccgtggcttcggtaatgccccaatgggtggcgccgcctttatctttagggttaaatacgtaaccgccttcaagcgcaataattccatctataattggattcatcttccctttccttcgcttagtgaatatgcagatacatgagagaacctaacgttactgaaaatacggtcgtcagggcggcgatggtttgccgtacaatctgtttttttcttccctttgtttcgctatccgtcgcgataatggtgatatcactattaactttgaggccttgtcttggaatggtaataaaaagatcgttaataccaagcgctttaaggtcacgtctgattaaatagagaatctgcgttagatttgcatcattaacataatggcttcgacttccccataacgcagtggttattttttgtcgctcgataatctccagatgagcattctcgatgatgaaactgagacatttggctctcatcgcagtcattttaataacctgtgaatttgagaccgtcctcagttcatatttaccttcattgtaaatgcaattgctattaatgatataagttttcataacgtcttcctttagaaatgtacatcctggttgtctgtggtgactatattgtatgagaaatgtcttaatccaataaatgtcactggttttattgtattgtcattgtctatagcgagtgtaatcacattatttcattgtaattaaatgatatttaattacatgataaatgatatttactatgttctcaccagaacggagtaagcgggcgctgagaggtgttgttttctcttcgttagacggtgttgttaacctcatttttatgatttttatatcatctaaaaagatgatgttttgtgattagctattttttatgcctgtaacgattatggaccccgcagaacgagctgcgacaattttgaaacgtaaaaggaaatttgaaaatggctacaagcaaactgattcaaggcgatacaattactgaaactactcatgcagcgaatggttttgaccctgcaacaagcgatgataaaataagctatacttccgctcgtgttgcgaaaccggtatacaataaatataaaaattccacgactaaaccgaaggtattcggttattacaccgactggtcacagtatgacagccgtctgcaaggcaatatgtcccaaccgggccgtggttatgatttaaccaaagtttcaccgacggcttatgacaaactgatttttggctttgttggcatcaccggtttcagaaaaattgatacagaagaccgcgatgtcgtagcagaagcggcagcgctgtgcggcaaagtgaaatatgagccgaccttcctcgacccatggggcgacttccagtcttatatcaacctcggctttgatgtcagcggctgggatgtggatccgaagactgtaactcagtctaacgccaagggtctgctgggcgcgctgcgtgatatgcaggcaaaagcgaaagccgcaggtcacacgctggcgctctccatgagtatcggcggctggagcatgagtaacgggttccacgaaaccgccgcttctgactcttctcgtaaaatcttcgccaaaggcgtggtgaaactgttcaaacagttcccgatgttcagcgaagtggatattgactgggaatacccgaacaatgaaggggcgggcaacccgtttggtccggaagatggcgctaactacgcgctgctgattgccgaactgcgtaaacagctggattccgcgggtctgagcaatgtgaagatctctattgccgcttctgctgtcactactatttttgactatgcgaaagtaaaagatctgatggctgccggcctgtatggcatcaacctgatgacctatgactttttcggtacgccgtgggcggaaacgctgggccaccacaccaaccgcaaagcgctggaagagggcggctgggctgtcgaaactatcgttgatcacctgctggcagaaggtttctccgctgaccgtatcaacatcggttatgccggctatacccgtaacgctcgtcaggtagaaattgaatccctgtcgccgctgaaaggttcttacaacccaggttcaggccctactaccggttccttcgaatccggcaccagcgaatggtatgacgtcatttatagctacctggatctggaaaaccagaaaggccgtaacggtttcaacgtttacaccgaccaggtcgctgatgctgactacctgtatagcccggaatccaaactgtttttatccctggatacgccgcgtactgtcaaagcaaaaggcgaatatgcagcgaaactgggcctgggcggcgtgtttacctggactatcgatcaggacaacggcgtgctggttaacgccgtgcgtgaaggtctgggttatgaaatcgaatctgaagttatcgatatggaaccgttctactttgaaggtatcaatgtagaaaaagatgaagagcagagcgacagcgacgacgcgcagaaggtcaaccacgcgccgaaagcggcgattgaactgatggttgtaggcggatctacggtacagctgtctggcgcaggttcttctgatgaagataacgatgagttgtcctttagctggggcgtgccttctcaaatcgatgtggcagacaaaacggcagaaatcattgaggttgtggtaccggaagttagcgaaaaaacagcctttcagttcaccctgtttgtacgcgactgctacaacgaaccgtcctctcaacagcgctttgttctgacggctgtgcctgcgctatctcaggttcaaccggaaccggaagaggaagaagagattatcgttcctgtaccggacgaggaagaagataccacgccggctgaggatgatacgccagcagatgacaaaacgtcaccttacgcgcagtgggatgcttctaccgtttatggcgcaaactggggttctttcgaaatcgttagctggaaaggccataactatcaggtgaaatggtggtctatgggcaaccagcctgacctgaactgcggtgtcggcggtgcatggaccgatcttggcgcttactaatacacggtattaagccgatgtattgggcttcatgattcaagccctggtttaccggggcttttctccaccagggacagaggaagagtagaccatgaccatttccattcacgccagcgcatttgacgtcaacagctggtatcaaaaaattaccttaactttcatcaatgagagcggtaatgcggtcgatatgaaccatgccgcaatatcattcacggcttccgggcacatcgatccatggggaaatagcggcggtacgctcaaagggaacctgccgcttacgctgaatgagagttcgtatggcacgctggaaactaacaacatcatcattaataacagcgatgcattacttcttcagccgggcgaacgcgggacgctctctttcagcctcgcggcgacgcaggtgccggtaaaaatgtccgccatcaccttgacgctggcgtcatcgtcatccgaagacgcagagtctgcaaccccatccgatcaggagacgccagcgatacccgccgcagacgaacaacccgccgaacccgatgtgccggaaaaggacaatgaccttcaggaacacggccttacgcttaacgttagcgagttgaataccgcaagttggtatcaacgcgtcacctttacgctgaccaacctctacgcccaggcggtagatctcaatcagcttcaactgaattttacggccagcgcgcaccccgatccctacagtccgtttcagggaacaatgttggggaatcaggccgtgacgctggccagcgatgggggatggcccatcgagaagaataccatcaccattaatcatgacggcgcgctgatactggcggcgggggataccgccgaattacagtgctatctggccgccacgcagacgccagttgccatcagcgatttgaacgcgacgttggcccatgatcctgcccgtcagggaaaagtttgcgttcattttcctgccatgacgcagaccgtggcgctcaaaccggtgattgagctgctgtttcctgccggcgaaacccggcgctttgtcggtgagtggggcgaggttctgacaataggcgatcttagcgcaggaacgtatcggcttaccgtaccggtactggcgaatgatgagatgcaaatcgcgccagtcgagtcctcttttaccgttacgctgcaatccggcgatgccgccgcgcaggtccaggtatcctgtctgccgattgtccgttatgccagcgcgcgtctgatgattgacgcccctgcgcttggtaatgcgaaattgaccgttgagatcgccgatgctacgcaagcggatgagcgtaccgtcacgctgatcgccaaccaaccgcagttaatcacccggctactggcggggcatcattatacggtcaatctgcagcctgcgatgattaataaccgctttatatcggcacccatacagcttacggggtttatccctgctgcggcgcagattgccgaggttgctgtcgcttaccaacagtcggcgctcgacacggcgagtttcgtgacggtggatgccactatactgggcctgcccgatggcgtcgcgccgcagcgttatctgttcagcagcggtaaatatcagtactcattaatgctggagagcggcagcgatcggcagacgttggcattacgctttgcacccgggctgtatgatgttcagacggacgacattttcatcgacagtgtgccgtggcgttgtgaacaggccgggccgctacggttgttgcaaaaggtcaaccatgtggcgctggagtttctgcccggcgtgacgctacaggtaaaaggttggcctgattaccttgctcatggcggcgtgacggttaacgcgccagagacggtttctctttatcgcgatataccgtttagcgcgttgtttaaatacgatggttttgacggcggcggcgatccggttccggccgcggaggttgacgtgaacggggatggttttctggattacgcgacgttaccgatccataaaaccgttgcgctggtgcgccagatagaaaaagaagccgggcgtagcgtcatgccggtaatggtcatttataccgcgaatgccagcggcggtagcgcgctggcggatttacaggatgcgcaaaagctacgtaaccattttggtaactttattacccagtgtctggcggcgcagtcatacaaagatgagacgcatcctgtcccggccacctttgtgcttaacccggattttctcggggcactacagcaaggaccgtatggctataccgtagtacggcaaaaaaacagtgtgccggtgaatgcccaactggcggcggcgatacaagcattaccggcgatggctggctttatcgcgccttcgttgccgacgtttagcgacgatctctacggctatattcaggcggtgaactatcttgttcgtcagtttgccccggatgtggcttttggctggcagacgaatgtctgggcgacaggaacggcggactgggtgctgcgcgataccgctgatccggtagctgaagggcaggcgatcgccggatttattcatgaactgggcgtttacagcggagaatatgcgccggactttattgcgtttgataaatttgagtgtgactgtttcagtcctgatgcgcttgcccactatggctggaatgcgacatgctggcttaattacctggcgatggtcaaacaggtgacgaaagcgctgctgacgcccgccatgctgtggcaaatcccaggcggccatatgcctacagtagaagagggcgtcagtaaaatcagcgctgcgcactttgcatccggcggaaccttttttatgggtgacgcccgcattggcagcgatcctgacacgctctctttgcagctactcaatacggccttaaatagcgcgacttacggcgtcccgaccgtcggcgactttttacgtaaagataaagggtatgactggggccaaatgcaggcgctgaacctaccggactttaacgtcttttcgatcttatggggcggtggttctactatcagtattacgacaatccattctaacggtgaagacggcggctggctggcggataaaatggtagagtattatgctgcccctcgctatttcagataatataactgcttatttgcattaatctggactattagtttgagattcgaaggcgcgttctttcgaatctcttttcctgcgccccctgacctctcattctttatgcgtaatttgttattaattttctgtaatcattttgtattaagaattgtcttaatcttaaaaatattgcgtattagtgcgttgtgaatacagaaatactgcatagcgatgttatttattattaatttaagtactttttgagaggttatactgtgacgctacattgagtagacaaccgttaatgaaaaaaatgatgaacgacgcttttgctaaagataataatgagaattcattacactcttttcttttttctcagcaggctaaacctcacgcggcaattgatgccttattttcggccttgttgccatttggtcaaccgtttacgctgggtatcggcgatgagttttatttacaggcaaacgatgaacactacattgtattactggagtcaggcgttgtttctttctgtcatgatgacaaacgactccatatatcttcatcgtttgcgccatcggtcgtgggtatggttgacagctatggcgctacctataacgtccccgcgcgaccggaacactttttgctcgcagaaacggtttgtaccggtagatttgttcgcctgccggattttataaaaatcgccgatgaatgcgatttgtggcacgacgtggcccgttgtctggcttaccgtctgatggtgatgagcgcgcgcgatcgtgaattagtcggcgtcgattcttatctgaaagttcgggcgctgctgactgaaatctgggcttatccacaggcctaccgggaaagcattatcgtgttgaattttattcaacggcgtaccgggatatcgcgcagtcggaccatgaagattctgtctgaactaaaaaaaggcgggtatatccatattgataatgggcggctgacggcgctcggaaaactgccagtggcgtattaatgcactatccgcaacgatatatttacatatctcgactgaatttgcctggtatcgttaatagaatgttttactgaaggttgttatgaaagctatttttaaaaagtcaatatggctaaaggagataggccgaacgactggtgtaaagttaatataaaacaacaggttatgcctggtcctataaaaccaaatgtcgatgattgcaacttgccgttggcttgctaataattaataacatcgttatctcattataacgtaaagataaactcacgacgttgagtggctgttttattgcttctgacatttatatcagaacaagaagacactttttttcgcataagaaaaagtcgtgatattgctgtgaagaaatatcagcagccgtttcgttaaaaaatctgattacccttatttttatatttaaaaggagcttgaatgaaaaagcctgtactagcattaatggtctctgccattgcctttggcggaatgttgtccaccgcgcaagcggatactacaaccgtcactggcggtacggtaaattttgtcggacaggtcgttgacgccgcctgttctgtttccgctgactctgtcgatcagaccgtgacattaggccaggttcgcgccagtaaattaaccgaggccggtatggtggcgaatcaaaaagaagatttcaccatcaaactggaagactgcgatactcagaccagccagaatgcggcggtgatttttaatggccaacaggacgcaaaccagccggggtcgctggcgaataccgctggggcaggttcggcgacgaatgtggcattacaactttatggaccagatggccaggcgctgaatatcggtgaatcgtccagtactgttaccttgaatgatggcgaaaacgttattccgcttagcgtggattatatcgctaccggtacggcgactgccggtaatgttaccgcgacggcgacatttagcatggtttattcctgattccttatcgggatttttttctcgtctgttgggaggcgagaaaggggcgttacgcgcgtcactgcgcgtaacaaaccgacggcatcaggatattacgcagatgaaaaaaaacgtaccgattttccttcgattattgctactgctgtcggcggccggcctgtcgtttgccgcgcaggcgggaggcattgcgctgggcgcgaccagggtgatttatccgcagggaagtaagcaaacctccttgccgattattaattcttctgccagcaatgtttttttaattcagtcatgggtcgccaatgccgatggttcacgctcgacggattttatcattacgccgcctctctttgtgatccagcctaaaaaagaaaatatattacgtattatgtatgtcgggccgtcattaccgaccgatcgcgaaagcgtattttatttaaacagtaaagcgataccctctgtcgataaaaataaattgaccggcaactccctgcaaattgcgacgcaaagcgtgattaagctatttatccgcccgaaaaatctggcggaggcgccagctcatgccccgtcgacgcttcgctgccgtaacgagcgcggccagctaacgattactaacccttcgccgtactacgtttcgatggttgaactgtatagcgcggggaaaaaactgccgaatactatggtaccgccgaaaggcgcgatcactctcccggcgacgcccggccaggtatctttgcgcacggtaaacgattttggcgcaacgacgccagcacgcgtttgtccagcttcatgatgttatgcgtaatcagcttttcatgacgcgatattactccagcgtaactaaacccgtattaaccccgctggcgttggctatcgcactggcgcctgcgccggggtgggcggaaaactatttcaacccggcatttctgtctgacgacccgtctgcggtggccgacctatcgaccttttcccgtaatgcccaggcggcggggatgtatcgcgttgacgtttacctgaacaatacgtttctcgcaaccagagacattgccttccaggcggtgaaaacgacgggaaaaagcgcgcccaccgatgacagcggattacgcgcctgcctgacgcctgaaatgcttaaaaatatgggggtaaacaccggggcgtttccactgttggcgaaggcggcggcgggaagttgcccggatctcgccagtgcgataccggccgcccggacccgctttgattttgcgcagcaacgtctcgacattagcatcccgcaggcggcgatggttgccagcgccagaggctatatcccaccgaaatactgggatgaaggtattaatgcgttgctattgaattacacctttaccggcgcgaatagtcaggatcggagcccaggcggcagtgcggagaacagctattttcttggattgaatagcggccttaatctgggggcctggcggttacgcgactactccacatggaacgcgaatagcggcgatcagaatagcgacagcgactggcagcacatcagtacttatctggaacgtgatgtggtctttttgcagggagaactgacggcaggcgatagttataccccctccgcattattcgacagccttccttttcgcgggctacaactggcgtctgacgacaatatgttgccagacagcatgaagggcttcgcaccgaccattcacggcattgccagaagcaacgcgcaagtgaccattcggcaaaacggctacatcattaatcagcgctatgtgccgcccggggcatttactattaatgatctctatcctaccgccgccagcggcgatttgactgtggaagtcaaagagtccgacggttctattaatcgttataacgtgccctattccgccgtgccgattctacaacgagaagggcggctgaagtatgcggcgacggtggcggagtatcgcagcgatagtagtcaaaaagagaaggtgaaattcagtcaggcgaccttgatatgggggttaccgcatggttttacgctgtatggcggaacacaactttccagtcattatcacgcgctggcgatcggcagcggcgcaaatctgggcgactggggcgcggtgtcgctggatgtcacccaggctaccagtacgctggcggataataacacctaccaggggcaatcgctgcgtttcctgtatgccaaatcgcttgcacagtcaggaaccaatttacagcttatgggctatcgctattcaacctcgggcttttacacgttggatgataccacgtggaaacggatgagcggctatgacgatgacagtcggactgacagcgataaaagcaggccggaatgggcggattattacaacctttattacaccaggagggggaaagtacaactcgatatcaatcaacagctaggcgggttgggatcgctttttattaccggcagccagcaaagttactggcacactgatgaaaaggattctttgttgcaggtgggatacagcgatacgctggcgggtattgcatggagcgtttcttacaacaataacaaatccgcaggcgatgcggagcgcgatcaaattttcgcgctgaatatctcggtgccgctaagtcaatggctgcaacacggtgatgaggtcacgcgccatcacaatgtttacgctacctttagcaccagtacggacaaacagcataacgttacgcagaatgcgggccttagcggcacactgctggacgaaaacaatcttagttacaacatacagcaaggttatcagaatcacggtattggcgaaagcggcgccgctagcctggaatacgatggcgcgaaaggcaacgccaatattggctataacgttagcgataacggcgattaccagcaggtgaattatggcctgagtggcggcctggtggcgcacgcgcatggagtgacgctaagccagccgttaggcaataccaatattttgattgccgcgccgggcgcagccaatgtcggcgttgtcgaccagccgggtattcatacggacgcgcgtggctatgcggtggtgccgtatgcgacaacatatcgccaaaaccgtatggcgctggacgttaacgccatggcggatgatgtcgatattgatgacgcggtgactcgcgttgtgccgaccgaaggcgcgctggttctggcccgctttaaagcgcgggtcggcgcgcgtgccctggtaacgctgaatcataacggtaagcctgtaccctttggcgcaacggtgacggtgaatgatcgccatgcggaggcgattgttgacgaggccggggaggtctatctttccgggttgtcagcgcaaggcgttctgcacgttcgctgggggaacctaccggatcaacagtgcgtcgcgtcctatcatctctcttcctcccgtcagattctgagtcgacaacatgcggagtgtcattaaatgaaaatacctcttttatttgctctgctggcgggaagtgtcgtatcgcagtacgccttcgcagacgtgtgtaaaaacgttaacggcgtgccttccagtattaattacgatttaacgaccactctgacggcagaacaaaaccaggtgggaaagacggttcaactggaaaaaagccaggaagttaatgtacaggcggtgtgtcccgccggcgcgtcgacctatagccagacttatcgctcctatgtgtcgccatatccggtcgtagaaacgagcggtaactggaaatatttaaagctggacccggactaccttgaaggcggaatgcgaattgaggattcttcggcgggcgatatctatccgccaatgaacaatgtcctgatgggatatgatgaaaatgtgaaagcgggtcaaccgttttacgttcgtgactcaaatctggagtttcagctcaaaattgttaaaccgttcgtcggcacggtgaatattagtcctaagactatgtttaatgtttatgtcatgaccgccgcaggcgatccgctgacagatgtcgtgtacagcattctttatagtggaacggtgaccgtaccgcaaagctgtgaaatcaacgccggacaaacgattctggtaaatttcggcgcattatacagcggcaatttcaaccatgcaggccaaaagccggagggggtacgagcgaaaaaattcagcgtaccggtaaagtgcagcggtctggattcgcaggtcaatttaacaatgcgtcttatcgctacgccggatagccacgttccccaggctatcgcttcggataatgccgatgtcggcgtagtggtcgaaaccgatgaaggaaacgcgcttatccccaatgatgtacagagcgtcgcgccttttatcaccgatagcgccggacgcgctaacatcacattgcaggcctacccggtaagtacaacaggcgaaacgcctgcggaaggggcatttaccgcactggccagcctgcgagtggactttgactaaatgaacagatcacactgcgctctttttgccatgggactgatgctgtgtccacaaatcaatgccagcgctgacgacctcgcttataacctcgaatttaccggcactattgtggcgcaaacctgcgacatagatatttccagtctcagtcaaagtattgatttagggcagtttgcagttggcgatttcccctcgacgggaacaacgacaaaatttaagccctttaatatcaacctcaaaaattgttcccgaggaattaccggggcgaagatctggtttaccggcgaacccgatccggacaatcccgcgctactggcgataaccgacaccgggatgggaagcggaaacatgttagcaagcggggttggggtggaaattctgaatgatgatcaggataccatcagtatcaataatgccgactcggtggtctatccgttgaaagccggacgcaacacgctgtctttttatattcgctataaatcgacccggccgacggtcacgtccgggaacgcgacggcggtcatgtatttcgatatgcagtatgaatgaggagccatcgtaattatgcgtaacgatatcctgtacggcatcgggatgctgctggcggcatccggcgtccaggcgcacgatggccgggtctatgtttccggaaccatcacggacaatacgtgttcgctctctcctggctcggaaaatattaacgtggcgatgggcgcggtttctcaacggcagttttatcgcgcaggcgacggttccgcatggcaaccttttgctatcgatttacaaaactgcggcagcactgccagcggcgtaacggtcagttttagcggtgcggcggacagccgtaatacggatttattggcgcttaccgcaggggaaagcgacgcttcaggcattgggattgcgctttatgatcaaaataaaactttaatcccactggggcaagagagtgatgtggtgacgctcagtccgggtcaggcgtcggcgcatctgcaattttacgcgcgttatcttgccgatggcggcgcggtaacgcccggggacgccaatgcctccgcaaccttcattcttgcctatgaataagttctttttacgctgcgcgatatattggtgcttgcttcccatatcatgggcgcaggctggcgtggtaattggcggtactcgctttatctatcatgcgggcgccccggcattaagcgtaccggtaagtaaccgttcagaagcgtcctggttaattgatacgcatattttacctggtggccgctggccaggaaccaaaaacgaagggaatatcatgcccttcgtggtcacgccgccattatttatgctttcagcgcgccaggaaaactcaatgcgggtggtttataccggcgcaccgctacccgccgacagggaaagtctgtttaccttgagtatcgccgctattccctccggtaaaccggaagcgaaccgtgtacaaatggcgtttcgttcggctttaaaattgctctatcgccctgatggactcgccggcaatccgcagcaggcctaccggcatctgatctggtcgcttacccccgatggcgcgacggtacgcaatcctacaccctattacgttacgctctttttattacgtgctaacgagcgcgcccaggacaacgccggggtcgtggctccctttgcaacgcgtcaaacggactggtgccggcacacggttcgctgcactgtgcgctggcaaagtattaatgactatgggcgggtaatgccagcgcaaaccgtggatctgacgcgtattcattaacctatttttcaggcgtctcccgatagcgggaggctttccgaacttatcgaacgagacttttattatgtattatcacgcgttaaaactttcccgactggcgatgttgacgttggcaggcgttgccgtatccgcctcggcaatcgccgccgattctgccccgacgtcgcaaattggtccgacggcggaagcctacatcgtcagtcatccggataaagtgggagaggtcgtggcaacgtatttggccgaacatccggaatttttggtcgccgccagcgagacgttgcatcagcgtcagcagattgcgcaacaacaggcgtatgttcaactggcattacagtatcgtgctgagttgctcagtagcagcagtccttccgttgggcccaacgaggcaaaagcggcggtggtgatgttctttgattaccagtgctcgtggtgcagcaaaatggcgcctgtggtcgaaaacctgattaaggcgaacccggatacccggtttattttcaaagagtttcctattttttcctcccgctggccggtatccggactggcggccagagtcggcgaacaggtatggcttacacagggcggggcgaaatatctcgactggcataatgcgctttatgccacagggaaggtggaaggcgcgttaacggaacacgatgtctacaccctggcgcaacattatctaacgccgacgcagctggccgccgtaaaagaagcgcaaagcagcggtgcagtacatgatgcgctcctcactaaccaggcactggcgcagcatatggactttagcggcacgcctgcttttgtcgtcatgcctcagacgcaagacggtgatgtaaaacgggtgaccgtgatcccgggaagcacgactcaggatatgttgcaaatggcgattcagaaagcgaaggggtgatattcgctcagaggagaacgcacaggagtgaaagtaaaatgaagtctatgcgttgcgtcataccggtgattttactttcctttatcgttcatgaagggacagcgaaaccgaccgctcagattcattttatgggatcggttgttgaggcaggctgctggaatgacgtaggaaccttagaaattcaatgccataataaagagggagttgaacgttatattattgtcgagaatattatcacgccgatatcgtctcctcatgcaacggtaaaacgagattatttggatgaagataagcaattaacagtgctacgcattgtctatgactgaaccgcgtagcagaccgcagatggtgtcccgtcagtgtcgtgtgagaatattatgaaaaatgttctcaccttcccgggacacggtctacagactttatcttcagataaacggcgctaaaaagaaaagcacgaacaataaaaaaagagtgggaataccaatagatataattttattacatcggtgagtatgatattgaatagcttgtggcggtatgtcagcagcgtcaatgataaatctttcatcgatttttatcccctgcctggggagcgtaacgaacagttcgaaaagcccgatttgttgtaaatctcgtcgcagcagataaagaagttgcgtcaaattagcatcgctaacaaattgacttcgctctccccaaactgcgtgtgaaatcatctcccgcgtaatcagtttcttgtaggcattttcaaaaagatagcttaaacaacgcgcacgcattagcgtcacctttagcacttttttatcatgtaatgatattatttctcttaacgactcattataaataaattcgttattaatagtatattgtctcatgaattcactccgttttgatattcataaggtacgtttcacactgtcagtgtgttcactggcggtaaagtactccttacatcagtacggataagcgtagagaaccgcaaagaaataagagaatcatttatgattaaacgggataatattatgcttttttacttttttataaagtgtgccagatatttttgatgttttttataaaatagcatcatgtgtttttattttacacaggctgaaatgatatcaataaaattataatttaataacaaacagatagaggaaatgatttacttattgaaataagtgtggtgcaaggttaatctgcgccttaaatgatggtgccagattataccagccaggataacctatatgcggccaataaaaaatgctaaaaaaattgactacaatctgatcaaagtgttcgatacggttattactgaaggaaatgcaaccagggcggcgaggaaactggatgtcacgcctgcggcgatctctcaggctcttcttcgtttacaaaatctttatggcgaagagttatttatcagaacccgcaaaggattagttccgtccagcaaaggtaaatcgcttcaccaggtatttcgccaggcaattgaatctatagaaagcacactgtgcgataaaacagatgctcaggagagtaatgaactcattgttctgggaggtgatatcactgaaaattactattttccggcattgctggatactgtgttgatgaatcgatatattattaaacactatgcgattaaaaaaacaggggaatactcaccagcctccatgctgacgcatggctatgcggatgtcatcatgggaattctggaaattaagaatgagatgatcgaaagttatcttattgataatttatctgattttgtttgtgtttgtggtgaaaaaagtccattggttgggcttgaaaaaatgtctttatataatttttatgctgccagacatgctgtctatcattcagatatgttctcttctttcaccgctgatagcattgatttattcaagagcagtacgccttatgcggggcgcagggaaataggttattatagtgattcactatttggcgttatcggtattgttgaaaaaagcgatatggttgcgattttgccaggaaagattgctacttattttagagatgtgcggcgttataatataaaaatactacgtatgcctgatgaaatgatttttcgtacgttacccgtttatgcttatctggctacaaacagcacccattataaaaatgtcaaaaaactgatatcaacatttcagtcgacctttctttttagccaggaaaagcagcctgacgctttggttgaaggaagcacatccttatgcgatttgtcggtttaatatcaaattatcgtattaaataaataaccattatgaccatggtcagtaaagcgaaaaataatgccatatatttatactcttctttttttaaagaagaggggaggcagcttttgttttcattgctgataataatgttagcatctactttaatacccgttcgaggcaccgtggaaaaaaactggctcaggccaaagcctttaaggtcgcgccgcagtagatataatatctgggtcaggttggcgtcgctgataaattgacttctttccccccaaagtttattagtgagttgttttttataaataatctcttgttgtgcatgattcagcatatattccagacactttatgcgcattgcggcaatttttatcatctttcccgtttttatgttttttagctcattggtcttatcattgtaagtgtgcgtgctgttaattaaataaatagtcatgatgttatttaatgggtttaattagggtggcgataataatatgcatattaaatttatggatcaactggtgtgattgtaatagcgtcttttttccagagaaaatcgtatcgtgtcacaaaaatgatggttttttagaaaaactaaaattttatttttagtcgctctaaaaataaaatgatagtagtgttaatttttatcagtatattgatatgctttgattgatttattgttgacataaaataatttgaattatggcgcaaggcctatgccaaccataaaaaaggtataggctattggtcacaatgcattaatgctacataattgttatgcttttatagtagcgccagggaaataaaatcttcggacgataaagaatagttttagtctgggtgttattttatggatgttttattttaaattattaaaccgatttctcttgttgacgtagggttatttgctaagcaacgggctggcatgttgtagccgctcgttgcctatatcccaattaatcaggagaaacgtatgaataagaaaagttcgtcaatggttaacatgcccgcaccgcgtgagccgattaaccagaaaatcgataccaataacgcactggttttaaaccataacgccatatatgaacaacgattagcggagatcacgcaatctaatacctgtgacaaggccattgtcaccgtaaatccctacgggaccgccccgttgagtctctatctgggggtttggatggatgaagctgccgcgcttgagatcaatgttgttgatagcgaagcgacgacagaggaagtgcgttatcaatatgatgtacatccgggcgctaaccttattcctgtgtgtgggatggtatccgcggtgaataatcagattaccctacgccttgcctcgcaaattgtcgggcaatatacagtaatgacagacgcattaccgcccacggattcggctaacgtgagcctcggcttccctattattagcgtctcctgtcctgcgcagcaggcctcgctgatggaggaaggactttatttctccacttattttgatcggtataatctggcttttgatcataacgggattgtccggtggtatgtaagtcaggaaatcccttcttataattttgtcagaatggataacggccatttcctggcgacgtcacagggaataaaccattgtctgaatatgtatgaatttgacattatgggacgggtttatacggtttatcttctcgacaatgagttccatcactccattcttcccattgagaacaatctggcgattgcgccttcagaatatagcaatggacggccagacggttactcaaccgggaaagatggcgtttctattattaacttatctaccggacttgaagtcgcctattacgatatgctgtatgtgatggattattccagatcgccgcgtccttccggaagcgcgccaggtcaggacgtatcaatggatgactggctgcatatcaaccaaagctatattaatgaacccaacaatttgctgatctgttccggtcgacatcagagcgcgatttttggcgtaaatgtggattccggcgaactgcgctttattatggcgaaccatgaggattggtctgacgaattcaagcaatacttattaacccctgtcgatgatgatggtgtcccgctgtacgatcttacctcgccgggagggattgatgcggcagataagaatttctggacctgggggcagcataacattgttgaaattccaaacgatgagcctggtatcctggagtttatggtctttgataatggtaactatcgttcacgcgaagatgcgaaaagtctgttgccgctcgataacttcagccgggtggtgcagtttaaaataaacctaaatacgatgaccgtaacgcgtccgtatgagtatggtaaaacggaagtcgggaaccggggctatagcagttttgtgagcgctaagcatttattgactaatggtcacctggttattcacttcggcgcgacgacggttgatgagtttgaacataccattaccgcgcaaccaggttccagcgatcttgtcgatccggatgaagggcaacaggcgttaggtcgactggtattacaagaaatcaataaagagacgaaagaggtcttattcgaagcgatggtgacgtcgggctatttcaagaacgaagagacgaatggcacgaattatcgttatgatatttctgcatttcgggtatacaaaatgccgctgtttgcataactaagtatgttatgcggccggttatcgaccgcataacattatggcttatttgctaatatcatccacgcgcatggtgtggtcaggttgaatattgttaacctgcttcatatagttaaccaacgccggtgcggtttgtatccctatatatttgatatttttacctttagtgaaggtaaatccgccaccacctttaccgataaaggagtccagcgcgacggtatagagtttattgtcttctaccggtttgcctttgatatcaaattcaacaatacgctggcccagcggtttggtgctgtcatatttaaactggacggttttagatacgtgcagcataccgtttttcagatcggcagcgtgtgacatgatggatttcaggtccttaccgctgatttccatgctcatgacatcgttggtgaacggatacatactcagcacatcaccataggtgatattacctttaggcaattcggtacggatgccgccagcattatagaaggaagcgtcggcgccaggaacggtagccatcagggcatcggtgattaagttgccggttggcgcggattcaccgtaagaacgggtcagcacttccggagagtgcgcgaccacctcatcggtaattttcttaaccttgttatcccattcgtcaattttggcctgcgtgaccggatctggcttataagtatccgcatacatggtgatcaacttaccattgtagctgtccacttttttggtttccgggttccagtcaagcaccagtttacctaattcgatggtgtacgcatccgtggaaacgacaagggtatcgcccactttaatcggttctggcgtacctttatgcgcatggccggtaatcaggacgttaagtccatagccttccagcgatttcgccatatcaacgtcggttttcagtgcgcgtgcgacatcagcctcgcctgcgctggactgcatacccggcacgccttcgtgggcgagcagcacggtcaggtcaactttcccttttaactcttccagctgttttttcacataaggaatcggatcgcggcagtcaacgccttcacgcacgcctgcggcaatcgcttcatagaatgcggaaacgccgtgcataccgatgacgccgatcttgaatccatctttttccacgatggtatacggttctttaattaatggcgtatctgtgccgctgtaaaaaacattatccaacaataccgggaattgcaatttgctgagttgtttaaccagattctcatggccatggtcaaattcatggttaccgacagagacggcgtcgtaaggcatggtatttaaaatatcaataatagcctcgcctttggtcagcgtactgataaaaggtccggtgaaatagtcgccagcatcaaagaaaaagacatctttctctttcgcttttgcatctttgacaattttcgagatgggcgcaaagccgcctaccggacgtgtcttggatacataggggataatttctggggttacatgggcatgtaaatcgtttgtataataaattgtgatgtcacgcgcatcggctgaaaaggaaatggctgaagacaaaccaatgcacagcgacagtagggatatcgaaaactttttgttcatataaaccatccatttacgctacattaaagaaaaacaatgcctgtagtcgtgtcattcacgactacaaaccggggaaattaagtaatattcatcaagtttattaattattaaaactcgaagccgatcaggtaattcatacggtcgccgtagccgtcataccccaatttattattgaagtaacggtaagagacggaggcggtccatcgcggcataaatttccatgtaaacgttaccgcgccgttcaggccggtcgtcccaccctgttgttcggcgtaggcatcattacgatccatttcaacttcgttccagtttgaaatgacgaacttttcattaaacatatcgaagttataagccgcgacccaaccgagaacataaccgttaaagcctgtcgcctgtccatactttttagaggtataatcgttcgataagttatgaacagcgaaatagggcttaataaagcctgatgggctggttaaacccagataacctaccccgtacatcatgtttaattcatcaccgaatttattctccatcgacatatagagtttcatcattgcggtaaagttagagccttctactaccctataatgtcccagaaattgggttacatggttacggccttctaccggatggttgagcacgttcatttcataaaatgatgcaaattcgcccctgtcaaacacggcgccgaaatcggctaccgctttccacacttcgccgcgatcgacattgacaaagcctttattccagtcgccatatccgaagctaagtttaccgtatacgcgtttcaattccgctgcctggccattaaagcaagagaaaagaacacatgcggcgagtagactattaatatatttcttatttttcatgctcaactccatgaggtaaaaacacagtgaaatgttgtgtaaagaagcgaattctaaggagtgtctttttatacgtaggtgatagatgtctcaaaaatatcagcgacatataatcgtcaaatattcgtgtcagataatgttgtttattacgtgataactatttgatttatagtttatgtctctgttgtaaaagtcacaccggatagcatgaaattaatgaaacttcgaatgggaataatctctcgcaaagacaacttactgccattaaatgagggtgttaccgttcaaacagcaacatatattgacatcacaatagcggttctgacatatgggccatatttgagatctgcatcactcgttcgcgatttctttttttatagactgcttcaggcgtgttttctttagcacgaaatatatttatggtattaatattataatgagtgtgaataattttctacgataaaacgatgttaatggaagaaatataagacaaatcgaatatatatatagtgcaattaatttaggctgtattccgcagccgggtctatcggcaaatatatcgtaatcagaccgtgcgataactcaaaggagttgaaatgaaaagaacagtcgttgccagtatgatagggttggcgctatgcgctggatgcgtattatcaaccgcgcaagcggcaaccgcaaagcgtcctaacttagtcattattctggcggatgatttagggtatggcgatctcgccacctacgggcaccgcatcgttaaaacacctaacatagacaaattggcgcaggagggggtgaagtttaccgactattatgcgccagcgcctctgtgttctccttcccgcgcgggcctgttaaccggtcgtatgccgttccgtaccggaatccgttcctggataccggaaggcaaagatgttgcgctggggcgtaatgaactgactatcgccaatctgctaaaacagcagggctacgatacggcgatgatggggaaattacacctgaatgcgggcggcgatcgcaccgatcagccgcaggcgaaagacatgggctttgactatacgttggttaatccggcgggatttgtcaccgatgctacgctggataacgccaaggagcgcccgcgctatggcgtggtgcatcctacggggtggattcgtaatggccaacatattggccgcgcagataagatgagcggcgagtttgtgagctctgaagtggtgaactggctggataataagaaagacgataatccgttcttcttatatgtcgcctttaccgaagtccatagcccgctggcgtcgccgaaaaaataccttgatatgtattcgcagtacatgaccgactaccagaagcagcatccggatctgttctacggcgactgggcagacaaaccgtggcgcggcaccggcgaatattacgccaatatcagctacatggatgagcaggtcggtaaagtgctggataaaattaaggcgatgggcgaggaagataacaccatcgtcatctttaccagcgacaacggccctgtcacgcgcgaagcgcgtaaggtatacgagctgaacctggccggggaaaccgacggtctgcgcgggcgtaaagacaacctgtgggaaggtggcattcgcgtaccggcaatcatcaaatacggcaagcacattccacaggggatggtaacggacacgccggtatatggtcttgactggttgccgacgctggccaacatgatggactttaaacttccgaccgatcgtacctacgacggtcagtctttagttccgctcctgaaggacaagactttaaaacgccagaaaccgctgatcttcggtatcgatatgccgttccaggacgatccgacggatgagtgggcgatccgcgacggcgactggaagatgatcatcgatcgccagaataaacctaaatatctctataacctgaaaaccgatcgtttcgagacgctcaatcaaattggtaaacagccgcagattgagaaacagctttacggtaagttcctgaagtataaaaaggatattgataacgattcgctgatgaaagcccgtggcgataagccgacgcctgtcacctggggctaatggaataattataaaaaattaagtatgccacttagggcgatgcccacctgatccggtcactctgtgccggatcaggttcttttatttcagggaaggtaatgatgtttgggaaaagttgtcaggtcatggttaaaccgaccggatcggtgtgtaaccttgactgtaagtactgtttttatctggagaaagaaaagctctatccggatcgaaaaaaccattacaaaatgtcggaagagaccctcgaactcttcatcaggcagcagattgccgcacaggatattgatgaggtcatttttgcgtggcagggcggggaacccacattaatgggcatcccgttttatcgtaaagccgttgagtttcagcagcgctattgtggcggcaaaaccatcgtcaataccttccagaccaacggcatcctgatcaacgatgactgggcgaccttcttccgggagcatgattttctggttggcgtctctattgatggcgatgccgcgttacacgatgaatggcgagtgacgcgctccggaaagccgacgcatgaaaaagtagaaaatgcggtgcgttgtctggcgcagcacgacgtagaatttaataccctcacggtggttaaccgtaccaatatgcatcatcctgttcaggtctatcgctacctgaaaagcattggtagccgctatatgcaatttatccctttagttgaacgctgtggggaaaatgggctggcgcagccgcaggataaacatatcgcgatgacgccgtggtcggtcgatagcctgcaatttggtcagtttctgaatgcggtatttgatatctggatccgtgaggatatcggcgatatcggcatccagctatttgaacagacgctggcggcctggtgcggcctgccgccgcaggtttgcgtttttgctcccacctgcggcagcgcgtttgcgatggaaatgaacggcgatgtttataactgcgatcacttcgtatatccgcaatttaaactggggaatatccaccagaagacgctgcgtcaaatgaatcagggcgaacaaaatcgccagttcggcagcgataaacagcgttcaatggcgcaggagtgtcatcgctgtcaatggaagttcgcctgctatggcggctgtccgaaacatcgttttttaccctctgcgtcaggcgcaaccaatcataactatctgtgtgcaggttatcaggcttttttctcgcataccgcgacggcgatgagtgccatgcgaaccctgtatgaaaaaggcatctcacctgcagaaataaagtcaatatttgtttgaaggtagtattcgcagggagtgaatatgttttctcacattaatgtcgatgcttgcaaaacgccaggctgcaaaaatctggggattctggggagcccagactatctaccgcaagggaaaaatgttctctgtcgagcgtgcggttttttgttccccattatctcagccagatcgcttaatctttttcgccaggcggcgaatcaaccctggaaaggtctggtgaagtcctgtccgcattgtggcgggacgtcgctgaaaaaatatggattttccactaaaggtgaacggcgtatgtattgccgccagtgtaataaaacgttcatctcctataccgctatcaggagcgacgccagacaagagaaccttgccacgttgattggcgaaggagcgtcgctagttgaaatacgcgcggcgctggcgttagacagcacgggttttagccgcgaattacaaaaactgtcccgtcgcgctaatcaagcggaacgcgattttgtgtttcccgcgtttgatatcgctatgagcacgcgggcgtttcgtgtgaaatttaacggcggcgacagcagcttatacgtgctggtgacggcggaagaggagagcggtaaggtcgtcgcgatctcaacgaattactccgcccaaccggtggaagcggattatcaatatcattctgattacgaagaacgacttccgtccggcacgctggcgcatctggtgcagcgaaaagaggcgctgaccatgcgccgcaatgtattatttgatgtggattacggccccgccgttttatataaaaacgatccggggatgttagtaaaacccgtattacctgcttatcgacattttgagttggttcaggcgttgacggatgagcgttccctgaatgtccaacattatctcgatcacgaatgcttcattctgggcggctgtatgatggcgaattttagctatcttcgtcaggggcgctgtcatatttcgtttgtgcgtgaaagaggcgttacgccgcccaaacgcgatctccctccgcggttgtttttgagcggcggaattcgcaacaacgtctggcgtacattttccacacgggattatgcgatggcggtatgcaatctcacaggaaataaaaaggtgagtttgttacgccatgcgacgttaaatagcgcgacggcgtttattcgctatgttcacaaccatcccttcctgccgcatcttaaccggatgtctcctggcaatgttgttgccgtactggattacctaaaatttgaatataacgcttcacgtaactgaattgctaaaataaaaagtgtgatgaggtgttgttgcggtattttattcggacggcttaaaaatccagagtattaattttcgtggtccccatgaggggcgatgagattaatacactggagatttatcatgaatacgttaactacaacgtctgttgtccttcctgcgccgcgtccggcgattaatcagggtatcgatatcaataatgaaatggtgcttaaccataccgctatttatgaaaattgccttgcgcaggtcacgcaagagaatacggtagaaaatgcgctcatgttgttagacccttacggcacggcgcctttaagcgcttatgccggggtctggagtctggaaccggctgagatcatagtcacggtccaggatgcggcaaaaacggcgatgccggtagaacatctttacacccttacggcaggcgcaaatctgttgccggttctggggctggtagcggatactgaaaaccgtattgtcttttctcaggcagatacgccgcttgccgtctatacgctcatcacacagccattaccgccggtagattccgcggaggtcgtattaggttttccgattatcaacgtgacgcaacctgctaccgatgcgaacaagatggcgccagggttttattttattacgcatttcgatcgttataattacgcattagatcagaatggtctggtgcgctggtacgttactcaggattatccgtcttataattttgttcgaattgataatggccatttcctcactacttcagaagcgaaaaatacctatctggatatgtatgagttcgacatgatggggcgtcttcacacattctataatctcgataatcaatttcaccattctatctggccgtgggatagcaataccattgttgcgccctctgaatatacctcgggtcggcccgacgatttgaaaaccaatgaagacggcgtatcggttgtcgatctgactaccggactggagacggcttactacgatatggcgaaggtgctggatacgacgcgggtttcccgtccttcaggtacggcgccgggagaagacccgacggttaaagactggctgcatataaaccagagctacgtgaatgagacgaatcagttgttaattgcgtccgggcgtcatcagagcgcggtgtttggcgtcgatctgcaaacgcaagcgctacgctttattttgtcaacgcatgaagactgggacgacgcttatcagccttatcttttaaccccggtcgacagtgaaggtgtggcgctttatgactttagcaaacaggaggatatcgacgcggccgaccgtgacttttggacttggggccagcataacgtcgttgaaatcgccaataatacgccgggtatagtggagtttatggtatttgataacggtaactaccgttcgcgtgatgacagcaaaagcctgttaccgccggataactacagccgcattgtccatttcgtggtgaatatgaatgagatgaccgttatgcggccatttgaatacggcaaggagctgggcgcgcgtggctacagtagctgcgttagcgcgaaagcgatccagcagaatggcaatattgtggtgcattttgccgactgcacgtttgatgaaaatggccgcgccatctcttgccagcctggcgagagcgatattatcgatccgcaggcgggcagtgaggcgatggggctgctaattttacaggagattgcgcctacggagaaaaccgtgctttttgaagcgaccatgacgtcaggttactacaaaaacgcggaaacgaacggggaaggctatcgctacgatattaccagtttccgggtgtataaaatggatctgtacgcgtagcggtctatcatcaatgactgactgcactaaaaaagtccggcgtaagtcggacttcatttcgtaaaaaaacgagctattcatcatatataatctaattttaacgatgagtcaggcgaggtaagatagtagatccgaagaattcacctgattgagagaataaaaagtgaaacatctgcaccgattttttagcagcgatgcctctgggggcatcattctcatcatcgccgctgcgctggctatgctgatggccaatatgggcgcgaccagtggatggtatcatgattttctggagacgccggttcagctacgggttggggcgcttgagatcaacaaaaacatgctgttgtggatcaacgatgcgctgatggccgtgtttttcctgttgattggcctggaagttaagcgcgaactgatgcaaggctcgttagccagtctgcgccaggccgcttttccggtgattgccgccatcggcgggatgattgtaccggcattgctctatctggcctttaactactccgatccggtcactcgcgagggctgggctattcctgccgcgacggatatcgcctttgcgctgggcgtgttggcgctgttgggcagccgggttccgctggcgctgaaaattttcctgatggcgctggcgatcatcgatgatctcggcgccatcgttattatcgcactgttttataccagcgatctttctatcgtctcgctgggcgtggcggcgttcgcgattgccgtgctggcgctgctgaacctgtgcggcgtcagacggactggggtatatattctggtcggggcagtgctgtggacggcggtactgaagtccggcgttcacgcgacgctggcaggcgtcattgtcggtttctttattccgctgaaagaaaaacacggtcgctcgccggcgaagcgtctggagcatgttctgcacccgtgggtcgcgtacctgatcctgccgctcttcgcttttgcgaatgctggcgtttctcttcagggcgtcacgattgacggtctgacctccatgctgccgttgggaattattgccggtctgctgattggtaagccgctggggattagcctgttttgctggctggcgctgcgtttcaagctggcgcatctgccacaggggaccacttatcagcaaatcatggcggtcggcattttgtgtggcattggctttacgatgtccatctttatcgccagcctggcatttggcaatgtcgatccggaacttattaactgggcgaaattgggcattttgattggttcattgctctccgcagtggtggggtatagctggttgcgcgcgcgtttgaacgcgccggcataatcagtacgaaggaaagggggagcgatgtatcgctcccttgcgacattgaacagggagagaaatgagcatgtctcatattaactacaaccatctttattatttctggcatgtctataaagaaggttctgtcgtgggtgccgcagaggcgctttttctgacgccgcaaaccattactggtcaaattaaagccctggaagagcgtttacaggggaagctatttaaacgtaagggacgcggtcttgaacccagcgaactgggcgagctggtttttcgctatgcggacaaaatgtttacgctaagccaggagatgctggatatcgtcaattaccgcaaagaatcaaacctgttgtttgatgtcggcgtcgccgatgctttatccaagcgtctggtcagcagcgttctggatgcggcggtggtggtggacgaacccatacatctgcgttgcttcgagtccacgcacgaaatgttgctcgaacagctcagccagcacaagctggatatgattatctccgactgcccgatagattccacgcagcaggaggggctattctcagtcaaaatcggcgaatgcagcgtcagtttctggtgtacgaatccgcttcctgaaaaagcgttccctgcctgcctggaagagcgacggttgctggtgccgggacggcgctcaatgctggggcgtaagttgttgaactggtttaattcacaggggttgcaggttgagatcctcggtgaatttgatgatgcggccttaatgaaggcgtttggcgcgacgcacgatgcgatttttgtggcgccgagcctttattcgctggatttttatgccgatgagtcggtaatagagattgggcgcgtggagaatgtcatggaagaatatcatgcgatttttgccgagagaatgatccagcatccggcggtgcagcgtatttgcaatgcggactactcggcattgtttaaactacagtagacgtacctaccgtaatacttccggctgcggtattaacccgcagccggaatcattctacaagttcagcaggctacggtactgcccaccttcgcggataaacaccggaattctgttcagtggcgtagcgtactgcagcgtctgccctcctgaatagctttcaccggtcgcaagatccgtccatgtttccccttctggtagccagacatcacgttcgcgcataccttcatgcatgacgggggcgatcagcaggtcaggaccaaaacaatactggtcggtgattgtccaacttgtttcctgttcggggaattcaaagaacagggggcgcatcactggcgtattgtgcttatgggtttcctccatcagcgctttgatatagggcttgagtttttctcgcaacgccaggcaacctgtcagtacctcgcatacttcctcaccgtagctccagacctcgttcggcgcacctgtagggcactgggcgataccatcccgatacggttgtgcgggtaaaatctgcggatcgcggttgccgtgcagacgcatcaccgggctaaagacgccccactggaaccagcgaatcagcaattcatggaatttcgggtcgtgaatattgccaccatgaaaaccgccgatatccgtcgtccaccacggtatccccgcgattcccatattgagtccggcagcaaactggttgcgcagcgatctaaacgaggagtgaatatcccctgaccagaccagagcgccgtacttctgactgccggcccaggcgcagcgtagcaggttgataacctggtcttcgccatcggctttcatgccgtcaaaaaaggttttagcgtacatacgtgggtagatattgcccacttccagtaccggcccggcatggtagcgatagttgtcgtagtcgtaaacgctgaactcaggttcggcttcatctaaccagaataacttcacgcctttatcgtaatagttgcgtttggctttgccccagacgtagtcgcgcgcgcccggatgagtcgcatcaaagtaagtggtattgccgaggaaatccatattgatcggcaagccacgttccgtttgtaccagccagccgttttcgcgcatctcccgatagctttcggtacggttatccaccgtcggccagacggagaccatcagctcaattcccagcgatttcagctcggcaatcatggcatcaggatcgggccagtcgcgcgcatcgaacatccagtcaccctgattcggccagtgaaagaagtcgattacgatcactgagataggcagattgcggcgcttatattcgcgggcgacctccagcagctcttcctgcgtacgataacggagtttgcactgccagaagcccatggcgtagtccggcatcatcggcggtgtgccggtagccagcgcgtaagcccggctaatttctgccggggtatcgccagccgtgatccagtagtccagctgttcgctgacctgcgcttcccattcggtaacgttttgggcaaaggttacgcgtccgactgccgggttgttccataaaaatccgtagcccagactggagagcataaacggtactgaggcctgggagttacgttgcgccagctcaagcacgcatcctttgagatccaggttggcctgttgatactgccccatgccataaattttttccccttcggtggcttcgaagcgggctttcagtgaatatttcccaccctgaatagggcggaactcgcgtccctcaaggttgagtgcgctgacgtactggccgtgagatgattcatcctcgccaatttcgccccgcaggcgccagaactcctgcaacaggggtttgtgtggatggcggtaaaaggtaacctgtcctttttgattgacgatagcgataattttgccgttggtcagcgttgcctggtggtgctcataatcaatgtggcactgactttctgcgactggctcagtcaatgcccagtcttcatttctcattaccggcagatgacggccgctgcgtacgcgcaggctgttctcgccccagggttcaatccataaatagcgatcgttttgctgccagaccagacgacgcgggtcttgttgcataaatggcatggtggtgcctcccatattcgagggtgaaggtaaagaacgttatgagttgacggtttccagatcgtggcgaatcttctcttccatcgcttcgtatttgcgaaagaaaagtagtgggatcgctgcgagcgcgaagagtagggcgggtgcccagataaaggcccagataatgccctccagacccgcagcactctgggcatggttggggacatagccaaaactgttcatgatccaggcggcgaaagcggtgccgaggccactacccatcttgatgcagaaggtactgccgaaggcgataagaatgccggtagccttaataccggtcttccaggcgccaaaatcaacggcgaagcccagcatggcaaatggcattgagcaggcgataccgctgccgatattgccgagtatccaggcggcgatgaggaaagtaatgttgtccgctgccagccacatcatgacgccgccaaacgtggcgaccagcagaccgcctacccatatccaggttttagccaggtatttgctaaagaaggggatagcgatgataaacaggatctgaatcgtcgccaggctgttaatcagcggtaccagatctttacggtcgaggttgtaggtcagataatagacaatggtcgtgttgcgctgctgtagggcaatccagaagatcagattagccagcaccatcaggatccacggccagttacctttcatcgccgcgaaactttttttcatcggcaacttaggttcatgctgtattttatccgtatccatttcacgaatgtttttaaacgcaaagagcgttagcgcgcaggatataatggcaaacgtaattgccgtataaataaaaccagcgtgatcatcaccgttacctaaaaaagcgactaacggcaaggcggtcgcgttcattaataaaaccccaatttacccaccggtcattcgccaggaatttaaaaccagtctttctttgggagataaggtcatcaggggtaatattgcactgagtggtgtattaagtccggtaaatagaatgctggcaatcatataagatattgctgcatagatggcttttcctgtcatactgatatcaggagaccaaaatgacagcgcgctgaataccgcaaaaggcagcggtaaccataaaaaccagggacgacatttaccgtagcgtgaacgtgttttatcgatgatgatcccccatatgggggcgtctatgccatcgataatacgcgccagcagcaggataacgcctgctacggcaaggctaatgcccgcaacgtctgtgtagaaatataaaatgtacgttgaactgaagcagtacagcagattacccgccacatccaaagagccgtagctaatacgctgtagtaaagacaatgatgctgacccggaaggctgggtatcctcaatgacagaactcataatgataactccgatattggtacgatacgcccagaaaaacaacctctactttctaagcaagttttgaatattatttttatgtcgtttctgaatttaacctcagattaaaatgagtaagtaaggtgtacatgaaaagtagttaacccgacggcatcaatcaattattaaatcttacatcaggattgcgtttattagtttttgaatgagcgatgtttttatttgctaaggtggtcacagttttttcagtaatgaaataagaaaaggaaaacagtgaaagaaaataactttcaagtattacgtgactaagggaggggtagctgaaaaaataggctggtcaggaagagcgtgaacgagtgaggtcagagccagcggttgtcgagcaaaacggcagatagcaggcataaaaaaacccgctttacgcgggtttttctacaaagctgataacaagcaggcgattaagccagtttgttgatctgtgcagtcaggttagctttatgacgtgcagctttgtttttgtggatcagacctttagcagcctgacggtccacgatcggttgcatttcgttaaatgctttcagtgcagcagctttgtcgccagcttcgatagctgcgtatactttcttgatgaaagtacgcatcatagagcgacggcttgcgttgtgcttacgagccttttcagactgaacggcgcgcttcttagctgatttgatattagccaaggtccaactcccaaatgtgttctatatggacaattcaaaggccgaggaatatgcccttttagccttcttttgtcaatggatttgtgcaaataagcgccgtttaaattgcagcactcgttgcgtagtgatggcgcaggattctaccagcttgcgtgctgtgaatacagcctttccatgagaaaaattgcattaagcggcgggttttggggcggagtttgccgcatggcgatgaaaagcatcttctttatgtttcatcagggcaatcgccggttaaccttaaccgctgtacaaggtatactcttgcgattttcactgttttgagtcagacatgaagctgatacgcggcatacataatctcagtcaggccccgcatgggtgtgtgctgaccattggtaatttcgacggcgtacatcgggggcatcgcgctctactgcagggtttgcaggaagaaggacgcagacgcggtctgccggtggtggtcatgattttcgaaccgcagccgctggagctgttcgcgacggataaagcgcccgctcgcctgacgcgcctgcgtgaaaaactgcattaccttgcgcagtgcggcgtggactatgtgctgtgcgtgaaattcgatcgccgctttgccgctttgacggcgcaaacgtttatcagcgaactgctggtggagcgacttggcgtgcaatttcttgccgtcggcgatgatttccgctttggtgctagccgcgcgggcgatttcttgttattacagaaggcgggggcggagtatggttttgcggtttccagcacccaaaccttttgtgaaggcggcgtgcgtatcagtagtaccgcagtgagacaggcgctggcggaagataacctggcgcttgccgaaagtctgctgggacatccctttactatttccgggcgtgtcgttcatggcgacgagctgggacgtaccattggcttcccgacggcgaacttaccgctgcgccgtcaggtctccccggtcaaaggggtctatgcggtggaagtcaccgggcttggcgataagccgttacccggcgtagcgaacattggcactcgtccaacggtggctggcgtgcgtcaacaactggaagtgcatctgctggacgttgtaatggacctctacggtcgccatatagatgtaatactgcgtaaaaagatacgtaatgagcagcgatttgcgtcgcttgatgagctaaaagcgcaaatcgcacgcgatgagttaacggcccgcaagttttttgggctagccgggcaggtgtaaccctgacggtgtttatcaaaccgaaatacggaaccgagaatctgatgagtgactataaatcgaccctgaatttgccggaaacagggttcccgatgcgcggcgacctcgccaagcgtgaaccgggaatgctggcgcgttggaccgatgatgatctgtacggcatcattcgtgcggccaaaaaaggcaaaaaaaccttcattctgcatgatggccctccatatgcgaatggcagcattcatattggtcactcagttaacaagattctgaaagacattatcgtgaagtccaaaggactgtcgggatttgactcgccttacgtgccgggctgggactgtcacggtctgcctatcgagttgaaagtcgagcaggagttcggtaagccgggcgagaaattcactgccgctgaattccgcgccaagtgccgcgaatatgccgctacgcaggttgacggccagcgtaaagacttcattcgtctgggcgtgttgggcgactggtcgcatccgtacctgaccatggacttcaaaaccgaagccaacatcatccgcgcgctgggcagaattatcaaaaacggtcatctgcacaaaggcgctaagccggtgcactggtgcgttgactgccgttccgcgctggcggaagcggaagttgaatattacgacaaaacgtcaccgtctatcgacgtggcgttccgcgccgtcgatcaggatgcggtgaaagcgaagttcggtctgccgggcgtgagcggccctgtgtcgctggttatctggaccaccacgccgtggacactaccggctaaccgcgccatctccctggcgccggactttgattatgcgctggtgcagattgacggccaggcggtgattctggcgaaagatctggttgaaagcgtcatgcagcgtattggcgcggctgaatacaccattctcggcaccgttaaaggcgcggagctggaactgctgcgctttacccatccgtttatgggctttgacgtgccggcgatcctcggcgatcacgtcaccctggacgccggtaccggcgcggtacataccgcccctagccacggcccggatgactatgtgattggtcagaaatacggtctggaaaccgctaacccggttggcccggacggcacttacctgccaggcacatatccaacgcttgacggtgttaacgtcttcaaggcgaacgatatcgttattgaactgctgaaagaaaaaggcgcgctactgcatgtcgaaaaaatgcagcacagctatccgtgctgttggcgtcacaaaacgccgatcattttccgcgcgaccccgcagtggttcgtcagcatggataaagaagggcttcgtcaacagtccctgaaagagatcaaaggcgttcagtggatcccggactggggtcaggcgcgtattgaatcaatggtcgctaaccgtcctgactggtgtatctcacgtcagcgtacctggggcgtaccgatgtcgctgttcgtgcataaagaaacgcaggagctgctgccgattgagcgtactctggcggcgatggaagaggtggcgaaacgcgttgaagttgacggtatccaggcgtggtgggatctcgacccgaaagagatcctcggcgaagatgccgatcaatacgagaaagttccggatacgttggacgtttggtttgattccggttccaccagttactccgtggttgatgcacgtccggaattcgccggtcatgctgccgatatgtatctggaagggtctgaccagcatcgcggctggtttatgtcctccctgatgattagcgtggcgatgaaaggcaaagcgccataccgccaggtactgactcacggcttcaccgtcgatggtcaggggcgcaagatgtccaagtccatcggtaacaccgtgtcgccacaggatgtgatgaataaactgggcgcggatatcctgcgtctgtgggtggcgtctactgactataccggcgaaatggcggtctctgacgaaatcctgaaacgtgctgccgacagctatcgtcgtatccgtaataccgcgcgcttcctgctggcgaacctcaatggcttcaatccggccaccgatatggtcaaaccggaagagatggtggtgctggacaggtgggcggtgggctgcgcgaaaacggcgcagcaagagattctgaaggcatacgaagcttacgacttccatgaagtggtacagcgcctgatgcgcttctgctccgttgaaatgggttcgttctacctcgacatcatcaaagaccgccagtacaccgcgaaggccgatagcgtcgcgcgtcgtagctgccagactgcgctgtatcatatcgcagaagcgctggttcgctggatggcgccgatcatgtccttcacggctgatgaaatctggggctacctgccgggcgagcgtgaaaaatatgtcttcaccggcgaatggtacgacgggttgtttggcctggaagagaatgaagaatttaatgacgcattctgggacgatgtccgctatatcaaggaccaggtcaacaaagagctggaaaatcagaaagccaatggcatcaaatcgaacctggaagcaaaagtgacgctgaaatatgctgacgatgctaacggtacgatcaagaagctgaaactgttgggcgaagaggtcagatttatcttcattacttcccagttcgtgatttctgagcaagcggggggtattgatgatgaaaatattcagtacaatgctggtaatacgacagttcaggcagtggtaacgcgtgccgagggtgataagtgtccgcgctgctggcactacactactgatgtcggcaaggtggcggaacatgcagatatctgcggacgctgtgtcagcaacatcgccggtaatggcgaacaacgtaaatttgcctgatgagtaaaccactctgttcaacaggactacgctggctatggctggtagtagtcgtgctgattatcgatttgggcagcaaatacctgatcctccagaatttcgctctgggggatacggtagggctgttcccgtcgcttaatctgcattatgcgcgtaactacggcgcggcttttagcttcctggcggatagcggcggctggcagcgctggttctttgccgggattgcgatagggatctgcgtaattcttttggtgatgatgtatcgctcgaaagcgacgcagaagctgaataacatcgcttatgcgttaatcatcggcggcgcgctgggtaacctgttcgaccgcctgtggcacggctttgttgtcgatatgatcgatttttacgtcggcaactggcatttcgcgacgttcaaccttgccgatagcgcgatctgtatcggcgcggcgctgatagtactggaaggctttttgccgaagccgacagcgaaagaacaggcataagcgtaaataccgggtggcgcttatccggttttgtaggtctgataagcgcagcgccatcaggcaaacgtggtgccggatggcggtgaaaacgccttatccggcctacggttttatcgtcctttgtgcctccgggcaaaacacgtgagcaatttgcatgtctaaatccgtacagagcaacagcgcgatcctcgttcacttcaccctgaaactggatgatggctcaacggcggaatctacccgcaataacggcaagccagccctgttccgtcttggcgatacctcgctttccgaaggtctggagcagcagcttctggggttgaaagaaggggaaaagaaagcgttttcgctggagcctgacgccgcgtttggcgtccccagtccggacttgatccagtatttctcgcgccgtgagtttatggcggcgggcgaaccggaagtcggggcgattatgctttttaccgcaatggatggcagcgaaatgcctggcgtgattcgcgaaatcaacggcgactcgattaccgttgattttaaccatccgctggccgggcataccgttcactttgatattgaagtgctggaaatcgatccggcgctggaggcataaacatgcagatcctgttggccaacccacgcggtttttgcgccggggtagaccgcgctatcagcattgttgaaaatgcgctcgctatttacggcgcgccaatttacgttcggcacgaagtcgtgcataaccgctatgtagtggacagcctgcgcaagcgcggggcgatctttatagagcaaattagcgaagtgccggatggcgccattctgattttctccgctcatggggtttcccaggcggtgcgtaacgaggcgaaaagccgcgatcttaccgtttttgacgccacctgcccgctggtgacgaaagtccatatggaagtggcgcgcgccagccgtcgcggtgaggaatctattctcatcggccacgccgggcacccggaagtggaaggcaccatgggccagtacagcaacccggaaggggggatgtacctggtggagtcgccagaggacgtctggacgctgaatgtcaaaaatgaaggcaagctctccttcatgacgcaaaccacgctttccgtggacgatacgtccgatgtgattgatgcgctgcgtaaacgctttccgaaaatcgtcggcccgcgcaaagacgatatttgctatgccacaactaatcgtcaggaagcggtgcgggcgcttgcggagcaggctgacgtagtgctggtggtcggctcgaaaaactcttctaactctaaccggctggcggaactggcccaacggatgggaagaaccgcgtttcttatcgacgatgcggcggatatccaggaggcgtgggtgaaagaagccgcctgcgtcggcgtcaccgctggcgcttccgcgccggatattctggtgcagaatgttattgcgcgtctgcgcgagtttggcggcggcgaagctgtcacgcttgaggggcgcgaagaaaatattgttttcgaagtgccgaaagagctgcgtgtggatgttcgtgaggtcgaataagatttcacaattcagaaatctgcctgatgacgctacgttgaccagatcttaagaatttcttttgatattcaatgtgcgacaggaagaataaggcgtagtcgtcatccgttgctaatgccccacctttttgctattcatctgaaaaaccagcacaatcgttgctggttttttggttgtaatgcctacagggataagggaaatgggcaaaataaaatatggattgccaacgttactcgccatcggcttttggatggacgcaacaagcgccacggtgctggagctacctgcctgggagcgaaactataccgggactatcgcggggaaaccggtaaacgttaatatcacgcgatttggtaactctcttaatgggtattactgctatgaaccttgcaatcagcacaaggcagtgattgttctacgcggctcactccaggataaagaggtgcatcttgaagaacgcgtaaaggcgctttcgggttactggaatgcggaaatctccagcagtgagattaaaggcgaatggacgtccgcagataaaaaacgacattttcctgttgcccttatctattacaaacctaaaaactcccctgatattgtgctggtcacgaacacgaatgatgcagggggttacgacccttccaaagagattgattgcggcaatacgccggccatttcggcgataaaattataccgtgatggtaaactcatacagaccttagataccgcctcggtgggcacttgtagcccgtttatgcctcaatggggggatgtcaattttgatggctacccggatctgtcgattgtaacagagttacttgctgggccggatgctccagttcaaacatggctctatgaccccgccaaacagcgttatgttgatgcgccagcgtcttatcaggaaatcacttcaccagagatcgatgctgaacataaacagattgtcagctattggcgcggcggttgctgcagccatggcgtcaatgtgtatcgctggaaaggaaaaacgattgaactgatcgatcgcggtgaaagctactttcagcctgtgatcagtaaaggcaaaatgtataactgctacatgacaccttcctacgctgatgggcgtattatttatccgctagtacgtaaaaatggtcatttgacgccgcctcttagccttgatgggacgtgtcaatctttttggctaaccggtaatgttcgtaccgtgattcaggcagaaaaacccggcgctgagcccgaatcgcttgagattcagtggcaggaaaacaaagcatcgccagggcgtttttgcccattagttccgtttgtcgaaggtgataagctaagtccgcgtctggtgacggatgacgatgtgcctgatgcctgtatcagtcgcgctgagtatgaagatataaaacaataggtcaggagagcattaatgacagcatccctacacattattcttgataccgatccgggcattgatgacgcggctgcgattgccgctgcgctgttcgccccccagcttgatctgcaactaataaccaccgtcgcaggtaatgtttccgttgaaaaaacgacccgtaatgcgttgcagcttctgcatttctggaacagcgatatcccacttgcccagggggccgcgacaccgctgctgcgtccgttacgcgatgcggcatacgtccacggcgaatccggtatggaaggctatgattttgtcgaccatcagcgccaaccgttggcgaagcctgcgtttatcgctatccgggatgtgctgatgaacgccccggagcccatgacattagtggcgattgggccattgaccaatattgcgttgctactgatgcactatccggagtgtgcgtgtaacattcgccgtctggtgttgatgggcggttccgcagggcgcggcaattttacgcctaatgctgaatttaacattgctgtcgatccggaggccgcggcgctggtgttccgcagcggtctggagattgtgatgtgtgggctggacgttacaaatcaggcaatgctctcgccagattttctgaataaactgcccgcgctgaatcgcaccggtaagatgttgcacagcctgttcaaccattatcgcagcggtagtatgcgcactggcgtccggatgcacgatctctgcgctatcgcctggctggtgcgtccggagctttttaccctgcaatcctgttttgtggccgtagaaacgcaggggcaatataccgccggtaccacggtggtggatattgaagggcgtctggggcagcccgccaacgcgcaggtggcgctggcgctggatgtggacggttttcgtcagtgggtggctgaggtgtttgcctatgcgccgtaattacatgttggcgccataatctcatactttgccgcgatagagtctctccggcctgcccactttcccgtagctgatctccgcttcgagaaagttatttttcacgccttgttccagatagcgtcgggcagtggttttactgctgcccagaatttgcgccagagtgtctgctgtatgtactgcctgcgggtcggcgaatatttgtcgtacccggttgaaggtgttttcatcaattccccgcagtccgctattcggttctgcggtttgttctttggcctggatattaaataaggcatcaacgtgcgtctggtttgcctgctcactggaacgtaacgaactgcggtaacgggtgaaccgctccagggtatgctgcaggcgctgataatgtaccggcttaatcaggtaatcgaatacgcccatgcgtaaggcatcgctgatggtatccatatgattgtcggcggtaatgaaaataattcgccccgtgtagttggtgctgatggtatgacgaattaaatcgatccctttgccatcgggtaaaaaattatccaatagaattaactgtggttgatagaggcgtatttgcttcttcgcactttccagtttgtctgcgatgccgacgattgaaaactggggaaaaatcttgatggtgtccaccaggatttccgctagcatcggttcgtcttcaacgatgagtgtcgtaatgctatccatgttattcttctctggtaaaagggatatagagggtaaaaatggtgccaaaaggattattgttatcgacgataatgtcaccattggcctgcttgacgtagctgtgcaccaaccataatccaattccgtgatcgccgttgttgtgggtggtcactccacgctcgaaaatatgctggcggatattttcgtcaataccacatccctgatcggcaacttcaataatgacttcattaccttcgctgttgatcaggcactcaatctgtcgcgagccttcgcgattgagcagggtggcgttataggcgttgtccaataaattgccaacaatcgaaatccattcattatgcgagagcgatgacggcaggtgttcaacaaagcttgaaggatcgaaaatcagctccagccccagctcttttgcccgataatatttaccgattaatagccccgcaaggtggtggtcgcggaaattatgggaaataaaatcgagtactttctggtggctttccgactgctgctgaatcagcgccagcgcattatcgtagcgcttcaggaacagcagtccggcaatggtggaaataaggttgcgatgctcatgctgcacggcgcgcaggttatcggcgtattgccgcacctgacttaactgcaggctgagtgtattgatatcgtctttgttgcgaaagctaataacccagccctgaggctggttgtcaataatgaccgccatgcgactggcgatgactttcatttggttaaaggtgacgatctcatctttttgtttttttgcggcgcatcgtaaaagaaggcctccggcaacacgacatggtggattgcatagccaatgagttcagactccggttggctcagattcagtaagcggcgagccgtttggttaatggcggtaatacggtgatgggagtcaatggcgatcaacccttcaaataccgactcaaataacacgctttgctgaattaatagttgtgaaagctgctgcggctccatgttaagcatctgctttttaatatgcagcgagaagcggcgggcacagtacaacagtaccagcagcagtaacgccatcgggaacagcaacgagctgatttgtaagttaagccagctctccaactgttccagagtatagccgacggaaacaataccgatgactttaccggtactgtcctgaatcggggatttaccacgtagggaagagcctaatgaacctttgcgcaccgatacgtagcttttagcgttatacagcgcgtcgtcgctatcgccgccctccatatatttgccgatctcatccgggttgacgtgatacagtcgctgacctttttcgttgccaacggtaatgtaagtcgcatccgaaaacgagcgcattgggtcaatcaacgctttgatgcgtgacaaatcatgcgcttctacggcttcaactaattctggcatagcggatatttgcattgcctgaataagcacacgttggcccacctgataatgcaggcgttctttcgtgatatcggtcagataccaggtgattgccagcatcacgatggtggatgtaaacaggatcagtagaaatatccggttttgaaacgagtgtctggcaaaccagcgtgtaatttcccgtataaacatattggtatttaaatatttaattacggtattttcttgcattcggcatcaccggaacctgaaccagttcatacttacttttctttcagaaaaaatttggatgaaaatgggatacgacatgcgtatcccatccactattacatcgccagcacgtatttcagcatcacgcccgcggcaatggccgagccaatcacccccgccacgttcgggcccatcgcgtgcatcagcaggaagttctgcgggtctgattccagccccactttgttcgatacgcgggccgccatcggcaccgccgagacccccgccgaaccgataagcgggttgattttgttcttactgcacaggttcagcagcttcgccatcagaccccggccgccgtcccgataccaaacgcaatcacccccagcagcagaatgcccagcgtctgcggttgcaggaacttatccgccaccagcttcgcgcccaccgacagcccgaggaaaatggtgacgatattaatcagcccgttctgtaccgtgtcgctcaggcgctccaccacgccgctttcgcgcatcaggttgccaaaacagaacatccccagcagcggcgccgcgtccggcagcagcagggccaccagcatgagcagcaccaccgggaagaggattttttcccgcttactcaccgtgcgcagctgcaccatgcggattttccgctccgtctcgctggtcagcgccttcataatcggcggctggattaacggcaccagcgccatatacgagtacgccgccaccgcgatggcccccagcagctccggcgccagcttgcccgacaggtaaatcgccgtcgggccgtccgcgccgccgataatgccgatggccgccgcctgcggcagggtgaagctgataaggccgaagtagttcagcgtcagcgccccgagcaccgtggcgaagataccgaactgcgccgccgcccccagcagcagggtgcgcgggttggccagcagcgggccgaagtcggtcatcgcgccgacgcccatgaagatgaccagcggcgcgacaccggaaccaatcgccactttgtagaacagcgccagtacgccaggcgtgtagcccatgtccaccgccaggttctccatctggccctgcaccgacggtagcgccagcgctaacgcctctttaatggcatgcacgtccggcgcgcagttcagcttcgcggcaatcaccgccagttgcccggcgtcgtggtgcgccagcaggctttccagcgcggtcagcgccatacccgcttccgggatgttggagagcagcccgccgaagccaattggcagcagcagtaacggctcgaacttcttcgcaatcgccagccacagcagcagcaggctcaccagcagcatgatggcctggcctgcgccaaggtgcatcagccccatgccctgaagcagggcgttcagactttccatttcagttctccgttacgccagcgtcatcagggtgtcgccgacggagaccgcgtccccggacttcaccgcgataccgcgtaccgtcccggcctgcgcggcgcggatttcggtttccatcttcatggcttccagaatcagcagcacgtcgccttcggccaccgtctggccctcggtggcaatcaccttccagatattccccgccagcggcgcggtgaccggggtgccggcgcctgccggggcggcagcctgaaccggtgcggaagaggccgccggaacagccgcagtgagctggctgatatcgccgccgtcgctgaccttcaccacaaaggctttgccttccacttccacggtgtagataccggaggcggcaggcttctctgcttttgccaccggctgcgcggcttccgcctgcggcagtggctcaaacgccgccgggttattgcggttctcaaggaatttgaggccgatttgcgggaacagcgccacggtgagcacgtcgtcgatggcgtttcccgccagagtaatccccttctcctgcgcctggcgcctgacgtccgcttccagttcagccagttccggtttgagtaaatccgccggacggcaggtcaccggggcgcccccttccagcacgcgggcctgtaacgcggcgttcaccggcaccggggtgtggccgtattcgcctttcagaatgcccgccgtttctttggcaatggttttgtagcgctcgccggtcaggacgttgagcaccgcctgggtgccgacaatctgcgaggttggggtcaccagcgggataaagccgaggtcctcgcgcacgcgggggatttccgccagcacctggtcgagtttgtccgccgcgttctgctgcttcagctggctttcgaggttggtgagcattccgcccggtacctgggccaccagaatacggctgtcgtagcccttcagctggccttcaaaggcgtgatactttttgcgcacctcgcggaagtacgcggcgatattttccagcttcaggatatccagcccggtgtcgtgttccgtgccggcaagcgttgccaccagcgcttcggtggccgggtggccgtaggtggcgctcatggaggaaatcgccgtgtccacgccgtcgacgcccgcctcgatagccttcagcagggccatctccgccatcccggtggtggcgtgacagtgcaggtgcaggcgcacctcaaaacgttttttgatttcgctgaccagctcatacgccgccatcggtgtaagaatgccggacatatccttgatggcaatcgagtcaacgccggtctctaacaactgttcggttaaatccagccaggtctgcagggtgtgcgccgggctggtggtgtaggagagtgtgccctgggcgtgcgcgccgtggctgcgtactgcctgcagggcggctttcatattgcgcgggtcgttcatggcatcgaagacgcggaacacgtccatgccgtttttcactgcccgctcaacgaagcgttccaccacgtcatcggcgtagtggcggtagccgagcaggttctggccgcgcagcagcatctgcagcggggttttgggcatggcttttttgagctcgcgcaggcgcagccacgggtcttcgccgagaaagcggatacaggcgtcaaaggtggcgccgccccagcactccagcgacccgtagcccacgtcatcgagcgcggcggcaatcggcagcatgtcatcaaggcgcaggcgggtggcgaacagagactggtgggcgtcacgcaggacgacgtcggtaatggcaatggtcatggatccctccgggaaattaaacgtggtggcggtgatggtgaatggcggcggcaatcaccggctttaagcgggtgaagtcgtccacgacgggaacggcgcgcggtgcgggcgcggcgacgggttccgggaagaagcgagtaatcacggcagacatgccgcgaatggcaaagatgagcaggaacagaaagctcagtacgaaccccatccctaaaaacatcagggtgaaaccttcacccagtagtacagcttcgttcatgaatcattttccataatgagaggcacgacggtggccttgacgacaaccttcctggtgaatccggctaaggagtagagtggatttcccttggccacctctggctttggcctctacttttctccaggtcgtttgctgccaagacaccgccgtgcgtttttttacaccatcatgctgaacacgatgctagcgataaccagcacaataccgccgcccagacgagaggaaatttgtgcatatgaaatgaggttcatacggttacaggcggagagcacttccagatcgccggagccgccgcggttggccatacaaagacccgcagtaatggatgattcaatcgggtagaagccaatcaaccagcccccgatagctgcgccaacgactgcgccgaccacaatgattgcggcgataactacgttcgcgaacgtcagggcatcgatgatctcttgcagatcggtgtagcaaacacccacacctaccatcagcacccacagtagctgtttggagaagaagtcagaaagacgtttcgccccggctttaatctccggtgagcaaagacctgatgcgttcagcgcagcaacaatcaggaccatccaggcgaagtagtgaatagagacgccgccgatgcttggcagaattttcttggcaacaacataggccagcaggaagcaggtggtggatagcaccatgccaaccgccgtttcacgatgggtaatctgaccggccttttcatcatcttcggttttgaaggaagccttacgaaccaactcgccttcaccgctaagccaggtgtattttttgcctatcatatcgaggagggcggcgaaaataatggcgaagatattcgcaatggtcagaatagcaatagccgttgagtaatactcttcgcgagaacgtccggtaaccgagtgataaatttcagacagaggcacggcgcccgcgccgttaccaccgcccataatcggcagaacgtacagcatcatgatacggtcgaccgggataccgaagcacagaccaatgacgataccgaaaagggacgcgccgacaatcccggcgaggatggttgggatatagcccagcagtgattttaatagcagcttacggtttaccgacaggatcgcgcctgtgatcaacactgcgataaacaggttaaggaagttgcttttatccattacgttgctgatcgcatcaatttctttctgcgtaaatatgccagcatagacaaaataagctgcaaccagaaatatcataaccggtgcgccgccaatatatttattgaagatcggtaaacgtttgccgatttcaccaaaaaatggcccccatcacaaacataagggcaaaaccacctactaagtcagtcggtatagcattataaaaatgagaaagtaataaagtaattaatgcaaaggcataaagcggtagcggcataccaaagattttgaatctgagtaaatcgctagccccctttttctccgtcgccgaagcctgggtcatgttggtcataaacattttcctgtgtattgatgggtaacaagacccgcgcatactaataaattcaatgaaccatgagatgtgactatcttcactgaatggttgtgtttttaattaatttaattatttttattaactctggttaattaaggaaataaaaaccataaagcttataaaagcaagggggaaagtgtgatgtctattccagacgagtaatacaaacgctggcgaaatatgcgacgttatttgctgacggatgcagaatagagtgaatctaatatttaaacgcatttatttgcaaaaggatgtattgcgtcgcgagtcggtcgccatgtttctggagggcgtgggactcgccctggaagacgattgtgaaatcgcggtatgcgcatattggcagggtgagatagtcgggtgcggttctctggccgggagcgtactgaaatgcatcgccgtttccccggttttacaaggggaagggctcagcctcaaactgctgaccgagctgcttacattggcctacgagttaaaccgcagcgagcttttcctgttcactaagccgcaaaatcggttgctgttttctggcgcggggttttggcccattgcgcaggcaggtgagctggcggtgttaatggagaacagcagtgaacggttagcgcgcttttgtcgccaactggcgctttatcgtcaaccgggaaaaacgatcggcgccatcgtcatgaacgccaatccgtttacattgggccaccgttatctggtggagcaagcggctgcggcctgtgactggttgcatctgtttgtagtcaaagaagatgcttcatttttttcctataccgaccgttgggcgctgatcgaacaaggaatcgcgggcattgacaacgtcacgttgcattccggctccgcttatatgatctcgcgtgcgacgtttcccggctatttcctcaaagaaaaaggggttgtggacgactgccattgccagatcgatctgcaactcttccgtgaacatctggctccagcgctggggattattacccatcgttttgtcggcagtgaaccgttttgtcctctgacctgtgcctataaccagcgaatgcacgacattttgcacgatccgaagcgtagcggcccggttattgaggtcgtcgagctggcgcgggtggagaaaaacggcgcggctatttccgcctctcgcgtcagaaaactgtatagcgaacgtaattggtcggcaataagcgcgctggtgcctgctggcaccctggcatatctgcagcggcatgccgccagacacactgaaaccatatgacgtaacaccgttaacaaggaacataactaatgaaaatcattaaagatgccctggcaggcacgctggaatccagcgatgtgatgatcaggattggtccatccagcgagccaggaattcggctggagctagagagtctggtgaagcagcagtttggcgcggcgattgagcaggtggtgcgcgaaacgctggcgaagctgggcgttgaacgcgcgctggttagcgtcgatgacaaaggcgcgctggagtgcattttacgcgcccgagtgcaggcggcggcgttacgcgctgcagaacaaacggaaattcaatggagtgcgttatgagaccacgtcgcagtatgttgtttatccccggcgcaaatgcggccatgttgagcacctcgtttgtctacggtgcggacgcggtgatattcgacttagaagacgccgtagcgttacgtgagaaagataccgcccgtcttttagtccatcacgcgcttcaacatccgttctatcaggatgttgaaaaagtggtgcgcattaatccactgaacacgccgtttggtctggccgatcttgaagccgtcgtgcgtggtggcgcggatatcgtgcgtctgccgaaaaccgacagcaaaaacgatgtgctggagctggaagcgcaggtcgaacggatcgaacgtgaatgtggacgcgaggtcggcagtaccaggctgatggcggcgatcgaatcagcgaaaggcgtggtcaatgccgtcgacatcgccacctccagcccgcgcatggtggcaattgcgctggcggcatttgattacgtgatggatatgggcaccagccggggcgatggcaccgagctgttctacgcccgctgcgcagtgctgcatgcggcgcgcgttgcgggtattgccgcctatgatgtcgtttggtcggatatcaataatgaagaaggcttcctgaaggaagtgcagttggcgaaagggcttggttttaacggtaagtccttagtgaacccacgtcagattgagctgttacatcaggcttattctccgacacgtaaagaagttgagcatgcgtatgaggtgattgccgccgctgaagaggctgagtctcgcggtctgggcgtcgtttcactcaacggcaaaatgattgacggcccgattatcgaccacgcgcgcaaagtggtggcgctgtcggcttccggtattcgtgattaaggaaggaaccatgaaagagactgtaaccatgctcaaccagcaatatgtcgtaccggaaggattacagccctaccagggggtaacagcgaacagcccgtggcttgccagtgaaacggaaaagcgtcggcgtaaaatttgtgactcgcttgaagaggctatccgtcgttccgggcttaaaaatggcatgacgatatccttccaccatgcgtttcgtggtggcgacaaagtcgtcaatatggtgatggcgaagctggcggaaatgggattccgcgatctgacgcttgcctccagctcattaattgatgcccactggccgcttatcgaacacattaaaaatggcgtggtgcggcagatttacacctccgggctgcgcggcaagttaggggaagagatctccgctggcctgatggaaaacccggtacagatccactctcacggcggccgcgtaaagctgattcagagcggtgagctgaatattgatgtcgctttcctcggcgtgccgtgctgcgatgaatttggtaatgctaacggctttagcggcaagtcacgctgcggctctttggggtatgcgcaggttgatgcgcagtacgctaaatgtgtggtgctcctgactgaagagtgggtcgaattccccaattatccggccagtatcgcgcaggatcaggttgatttgatcgtacaggtggacgaagtaggggatccggaaaaaatcaccgcgggtgcgattcgtctgtccagcaacccgcgtgaactgttgatcgcccggcaggcggccaatgtgatcgaacactcaggttatttttgtgatggtttctcgctgcaaaccggcaccggtggcgcttctctggcggtcacccgtttcctggaagacaaaatgcgtcgccacaacattacggcgagttttggcctgggtgggatcaccggcaccatggtggatctgcatgagaaagggttgatcaaagcgctgctggatacgcaatcattcgatggcgatgcagcccgttcgctggcgcagaacccgcatcatattgaaatttcgaccaatcaatacgctaaccccgcctctaaaggcgcggcatgcgaacgcctgaacgtggtgatgctgagcgcgctggaaattgacgtgaattttaacgttaacgtgatgaccggttcaaacggcgtactgcgtggcgcatcgggcggccatagcgatacggcagcaggggccgatctcaccattattaccgcaccgctggtccgtggccgaatcccatgcgtggtggaaaaagtgctgactaccgtcacgcctggggcaagtgttgatgtgctggttaccgaccatggtattgcggtgaaccccgcgcgtcaggatctgcttgataacctgcgtgctgcgggcgtggcgctgatgaccatcgaacaactgcaacagcgcgctgagcaactgaccggtaaaccgcagccgattgagtttaccgatcgggtggtggctgtggtgcgttatcgcgacggttcagtgattgacgtgattcgccaggttaaaggctgatgaagggcacagacctgttgtacctgggccaggcagttacgctggaggagatgctacaagcgcgcgataaacgtgccgccaggcagcgtcaggcgttgaactgctatcggctaccgttgatttccctcacgctggttgcaccgggcgccgttaaaaactcagcggtctggcggcgtgtcgccgattacgcaattgccgaaatactggcgctttgcgaacagatggagtgggtcaacgtctgggaaatgcaggtaaatgaacgcagcggcccggaatggatggcagcggtctgtgcgccggcaatggcgttgaaacagcacatgtcgacactggagatgagccatccgttagggcggctttgggacatcgacattattgatagcgacggtaagtcgctatcacgccgtgaactcgggcatcctgcccggccatgtttgatatgccagcaggatgctcatctctgtgcccggggcaagcatcacacccttgaccttttgttggatgaaattgcacgaaggattgaatgctatgaacgtgagcgttgtgactgaacggcgtacgccagcgtactcatcgctggcggctggcgaacttaatgggttggttgcaagagcgctgctgacggaagccaggctgacaccaaaacccggtctggtcgatattcgtaattcgggagcgcatagggatatggatctggcggcatttgaacgtagcactaccgccattgctccgtggatggaaaagttttttatcatgggcaacaacacggcggcgctggcggcagaaaatgtcctggtgatgctgcgtccgctggggatggcctgtgagaacgatatgctacaggcgaccaatggtgtgaatacccatcgcggggcgattttcgcttttggcctgctgagcgcagcgattggccgacttctcgcgcggggagaaccgttggagcaaaatcgtatctgcgaccaggttgcccgcctgagtcggaatattgttgcccacgagctctcagcaaaaaaagcgggaaaactgacaaagagtgaaacccatttccagtgttatggcctgtcgggcgcgcggggagaagcggaaagcggttttcgaaccgtcagaacgcaggctttgccggtgtttaaccgggtcgtgcaggagcatgacgatacccatcttgccctactgcaaacattgttgcatctgatggcgtggaatgatgataccaatctggtgtcacggggaggcctggaagggctttactacgtgcagcagcaggcacaaaaattgttgtggcaagggggcgtattggttgaggggggcattgaagcgatgcagtccctcgatgatgaactcatcctgcgtaacttaagccctggcggtagcgcggatttactggcagtgacctggtttttaagtcattttcctgccggttccctctatcctgagtaagtttctcttctttcattctctccagcaatgattcatcctgcgggatgaatcatgtcttttactgatatcgctccctgtttatcattaatttctaattatcggcgattttagatggcggcctccgggcgcgctggttactctgaaaacggtttacgcaatttttacaaaagagaatagctatgcatgaagcacaaatccgcgtcgccattgccggcgccggtggccgcatgggacggcagttaatccaggccgccatggcgatggaaggtgttcagctgggtgccgcgctggagcgcgaaggctcttccttgctgggcagcgatgctggcgaactggcaggggcgggaaagtccggcgtgatcgttcaaagcagccttgaggcggtaaaagatgattttgacgttttcatcgattttacccgtccggaaggcacgttgacgcatctggcgttttgccgccagcatggtaaagggatggtgattggtactaccggctttgacgacgccggtaaacaagccattcgcgaggcgtcacaagagattgcgatcgttttcgccgcaaactttagcgtcggcgttaacgtcatgctcaagctgctggagaaagccgcgaaggtaatgggcgactatagcgatattgaaattattgaagcgcaccaccgccataaagtggatgcaccgtcgggtacggcgctggcaatgggcgaggcaatcgccggggcgctggataaaaatctgaaggactgcgcggtctactcgcgtgaaggttataccggcgagcgcgtagcgggcacgattggctttgcgaccgttcgggcgggcgacatcgtcggcgaacataccgcgatgtttgccgatattggcgagcgcgtagagattacgcataaagcttccagccgcatgacgtttgcaaatggcgcgttgcgatcggcgttatggctaaaaacgaagaaaaatgggctatttgacatgcgggatgtgctggggctggatgtattatagcgactaaataccttcgtgatgtggttgtggtaatcaagattaattgattacaaagggcaatatattattgcccttttgtttttgccccccggttattcggtcagataaataacgcctttcaccattcatgtttcgacagtttcttcgcccacggcatgttctgccgttgttttcgcgttaagaatagtccgtttaaagacatccgggccaacggcatccatttgcgtgacgtaattgccattacgataaatgcggttaattggcccttcagacgcatcggtacgggtcattacgttcaacgggaaaaaattactgcctgaactgacgttagtcatattcagccgcagcgccttaccgtatgcaaaaggcacctcgaccagactgataagactgatatccatcggagggggagtgctgttcctcggggggggcgttttatctcttttgcttcaataggttggcttttttatgctgtagtgaggctggttgtggtccaatcgtatgtgcctgtcttaaagaaaaagaagctggatctttatatcgcgattgtaattcttattacattgtcttaatttgctgtttttgttgattttatgatgcatttgatttgttttttatatttttaatatattgatttttaaaatttttttgtcgttaactttcttgattttgaatttttatgcatttaatggcattgatggctattaagtgagtttttatcgttgttttttgttgttttaatgtcaaatttgaccatttggtccactttttatcatgccagccagttttttgcgaactcaaggaagcgcaagcgttttctatcgtaacttagttgatctttttgcctcttaaacagaataacttccttataatgtgcaaaataacataaaaaacaccctctttaagttgacttttatccggcttaacttcagaatgccgccgtttgccagaaatccacgggtaagcaaatttgcattgcttcatactgactgaatgaattaatatgcaaataaagtgagtgaatattctttggagggtgttttgattaagtcagcgctattggttctggaagacggaacccagtttcacggtcgggccattggggcaacgggttcggcggttggggaagtcgttttcaatacttcaatgaccggttatcaagaaatcctcactgatccttcctattcccgccaaatcgtcactcttacttatccccatattggtaatgtcggcaccaataaagccgatgaagaatcctctcaggttcatgcgcaaggtttagtgattcgcgatctgccgttgattgccagcaacttccgtaacaccgaagacctctcttcttacctcaaacggcataacattgtggcgattgctgatatcgatacccgcaagctgacccgactgctgcgtgagaaaggcgcacagaacggctgcatcattgcaggcgatagcccggatgcgaagctggcgctggaaaaagcgaaagcatttcctggacttaacggtatggatctggcgaaagaagtgaccacggcggaaacttaccgctggacgcagggtagctggacgctgaaagacggtttaccggaagcgaaatctgaggatgacctgccgttccatgtggtggcctatgatttcggcgcgaagcgcaacatcctgcgtatgctggtggatcgcggctgccgcctgacggtggtgccagcgcaaacctctgctgaagaggtgctgaaaatgaatccggacggcatcttcctgtcaaacggccctggcgacccggctccgtgcgactacgcgattactgctatccagaaattcctcgaaaccgacattccgctatttggcatctgcctcggtcatcagctactggcgctggcgagcggtgcgaagaccgttaagatgaagttcggccatcacggcggcaaccatccggtaaaagatatggacagaaacgtggtaatgatcaccgcgcagaaccacggctttgcggtggatgaagactcgctgcccgccaacctgcgcgtgacccacaagtcgctgttcgacggcaccctgcaagggattcaccgtaccgacaaaccggcgttcagcttccagggccacccggaggcgagccccggcccgcacgatgcggcgccgctgttcgaccactttatcgagcttattgagcaataccgtcagtccgcgaaataatcaggagtaataagagccatgccaaaacgtacagatataaaaagcatcctgattctgggcgcgggcccgattgttatcggtcaggcgtgtgagtttgactactccggcgctcaggcgtgtaaagccctgcgcgaagagggctatcgcgtcattctggtgaactccaacccggccaccatcatgaccgacccggaaatggccgatgccacctacatcgagccgattcactgggaagtggtgcgcaaaatcattgaaaaagagcgtccggatgcggtgctgccgaccatgggcggccagaccgcgctgaactgcgcgctggagctggagcggcagggcgtgctggaagagttcggtgtcaccatgattggtgcgaccgccgacgccattgataaagccgaagaccgtcgtcgcttcgatatcgcgatgaagaaaattggtctcgacaccgcgcgttccggtatcgcgcacactatggaagaagcgctggcggttgccgctgacgtgggcttcccgtgcatcatccggcctagctttaccatgggcggcaccggcggcggtatcgcttacaaccgtgaagagttcgaagaaatctgcgaacgcggtctggacctctcgccaaccaacgagctgctgattgatgaatcgctgatcggctggaaagagtacgagatggaagtggtgcgtgataaaaacgacaactgcatcatcgtctgctctatcgaaaacttcgatgcgatgggtatccacaccggtgactccatcaccgtggccccggcacagacgctgaccgacaaagaataccaaatcatgcgtaacgcctcgatggcggtactgcgtgaaatcggcgtcgaaaccggcggttctaacgtccagttcgcagtgaacccgaaaaacggccgtctgatcgttatcgaaatgaacccgcgcgtatcccgctcctcggcgctggcgtcgaaagccaccggtttcccgattgccaaagtggccgccaaactggcggtaggttacacccttgacgaactgatgaacgacatcaccggcgggcgcactccggcctccttcgagccgtccatcgactatgtggttactaaaattccgcgctttaactttgagaaattcgccggtgccaacgaccgtctgaccacccagatgaaatcggtcggagaagtgatggcgattggccgcacgcagcaggaatccctgcaaaaagcgctgcgcggcctggaagtcggcgccaccggttttgacccgaaagtgagcctcgacgacccggaagcgctgaccaaaatccgccgcgagctgaaagacgcgggcgcagatcgtatctggtacatcgccgatgctttccgcgcaggcctctccgtcgatggcgtctttaacctgaccaacatcgaccgctggttcctggtgcaaattgaagagctggtgcgtctggaagagaaagtggctgaagtcgggattactggcctcaacgccgacttcctgcgtcagctcaagcgtaaaggttttgccgatgcgcgtctggcaaaattggcgggcgtgcgcgaggcggaaatccgcaaactgcgcgaccagtatgacctgcacccggtctacaagcgtgtggatacctgcgcggcggaattcgccaccgacaccgcctatatgtactccacttatgaagatgagtgcgaagcgaacccgtccattgaccgcgataaaatcatggtcctcggcggcggcccgaaccgtatcggccagggtatcgaatttgactactgctgcgtacacgcctcgctggcgctgcgcgaagacggttacgagaccattatggtcaactgtaacccggaaaccgtctccaccgactacgacacttccgaccgtctgtacttcgagccggtcacgctggaagacgtgctggaaatcgtgcgcatcgagaagccgaaaggcgttatcgtgcagtacggcggccagacgccgctgaagctggcgcgcgcgctggaagcggcaggtgtgccggtaatcggcaccagcccggacgccatcgaccgcgcggaagaccgcgagcgcttccagcacgcggttgaccgtctgaagctgaagcaaccggccaacgccaccgtcaccgccattgaacaggctgtcgaaaaagcgaaagagatcggctacccgctggtggtacgtccttcttacgtgctgggcggtcgggcgatggaaattgtctatgacgaagccgacctgcgtcgctacttccagacggcggtcagcgtctctaacgatgcgccggtgctgctggaccgcttccttgatgacgcggttgaagtggacgtggacgctatctgcgacggcgaaatggtgctgattggcggcattatggagcacattgagcaggcgggcgtacactccggcgactccgcctgttccctgccggcctacacgctgagccaggaaattcaggacgtgatgcgccagcaggtgcagaagctggccttcgagttgcaggtgcgcggcctgatgaacgtgcagtttgcggtcaaggacaacgaagtctacctgattgaagtcaacccgcgtgcggcgcgtaccgtaccgttcgtctccaaagccaccggcgttccgctggcgaaagtggcggcgcgcgtgatggccggcaaatcgctgaccgagcagggcgtgacccaagaaattatcccgccgtactactcggtgaaagaagtggtgctgccgttcaacaaattccccggcgttgacccgctgttagggccagaaatgcgctccaccggggaagtgatgggcgtgggccgtaccttcgcggaagcgttcgctaaggcgcagctgggcagtaactccaccatgaagaaacagggccgtgcgctgctctccgtccgcgaaggcgacaaagagcgcgtggtggatctcgccgccaagctgctgaaacagggctttgagctggatgccacccacggtacggcgattgtgctgggcgaagccggtatcaacccgcgtctggtgaacaaggtgcacgaaggtcgtccgcacattcaggaccgtatcaagaatggcgaatatacctatattatcaacaccaccgcaggtcgccgcgcgattgaagactccagggtgattcgccgcagcgcgctgcagtataaagtgcattatgacaccacgctgaacggcggttttgccacgacgatggcgctcaatgccgatgccaccgagaaggtaacctcggtgcaggaaatgcacgcgcagatcaaaaagtcgtaaacaaagggtccggcggatattgctctaaccggacctgtaatataatgttgaaagggtttctgtaaagaaaccctttttttatcttgcgtaaggtcattcctggagaagtccgtttccgtaaccacattttcaatgtaataagcacgatattgctcacactaatcaatatttaagtcgcatactatcttgcatatccacaattttaatatggcttagtttttattagtttggacaggccgtagccaggtttttaatttgtgaaatggtgtgcttatgtgtgaaaaatatgttgaaagaccgctttatttgttaattgctgactggatgatggcagagaaccgatggatcactgccagggagatttcccgtcaatttgatattgaacattgcaaagcaattaatacgctctcctatattctgtcagaagtgggggaaattgtttgtgaagtgaagatgatccctaaccaaattgcaggacgaggctgccagtgccagcgtctggtgaaagtcgtgagtatcgactctcaactctatcgccgattgaatcataatttgcaggaaagaaaagtgagcgtggcgaaagcgccgcggctgtctgccgttccccccacagagctaaaccgtgagcagaaatggcagatgatgctctccaagagtatgcgtcgctaattgtctgtttacctgctggcggggtaaacggtaattgacgcgtaggccggataagcgtgagcgcatccggcatcaattactgtgctgattttggcttcacgtccgtcgtgcctttcaggcgcggtcggttttcttcggcctgcgttaacggcttcgtttcagataaccccgttcgacaacggatcgcaagatcctgatattctttggtattgaggtgtttccagtgcagctcctggtccgtaacctggcgtagtacgcgcgccggtgatcccaccaggagttgccttgcctcaccctgaaatccggctttgacaaaactcatggcggcgacaatgctctcttcgccaatcactgcgccgtccataatgacgctattcatgccgaccagggcgtcccgtcccaccacgcagccatgtaaaatagcgccgtggccgatatggccgttttcatgcacgatggtatcggtatcgcagtagccatgcataatgcagccatcctgcagattagagcctgcctccaggatcaggcgaccataatccccacgcaatgacgcgagtgggccaatataaacaccggcgcccacgatgacatcgccaatcagcacggcgctggggtggacaaacgcgtccggatgcaccaccgggatcagtccttcaaaggcgtaatagctcatagttgtacctcggttttttgccggatggcggcgtaaacaccttatccggtctacggttgcgcatgtgctgtaggccggataagcgaagcgccatccggcatagtcacattaacgacctttccacaccggatcgcgtttttcggcaaatgcctgcggtccttcgagcgcatcttctgaatgcagcaccgacggataatgcttcagtacgccgctgcggatgtagcggtagccttcttctaccggcatttcgctggtcgcgcgataaatctctttcagcgccgcgatagccagcggggcgctattgaccagttgttgcgccagttcgcgcgcactctccatcagttcgctctggctgacaacgcggttcacgactccccaacgcagcgcttcttcggcgctcattcgtctgccggtcattaccatttcgttgacgatagccggtggcagcagcttaggcagacgcaatacgccgccgctgtcaggcacgatgccgagcttggcttccggcagcgcgaagctggcgttttcggcgcagacaataaagtccgccgccagcgccagctcaaaaccgccgccaaacgcgtagccgttcaccgcggcgataaccggcttatcgaggtcaaatatttcggttaaaccggcaaagccgccgggaccaaaatcggcatccggcgcttcaccttccgctgccgcttttaagtcccagccagcagaaaagaatttctccccgccgccggtaatgattgctacgcgtaattccggatcgtcacggaaattaagaaaagcttcacccattgcaaagctggttttggcgtcaatggcattcgctttaggtcggtcgagggtaatttccaggatcgggccgttacgggtcagatgtaatgactcactcatagttcatctccagataaatagttttccggcgggagggattcctgccggaaggtttatttcagattttttttgattatttttcctgaacagttgcgcggcaggtcggttctgatctccataaaagagggaaccttgaacttcgccatattgttttcgcagaagctgaaaaactcggcttcgcttaatgtttcaccttcattaaggacaataaacgctttaatggcttcatcacggatcgcgtctttaataccaaccaccacaatgtcctgaattttcggatgcgcagaaataatattttccagctcgacgcaggagacattttctccgccgcgtttaatcatgttgcagcgcctgtcgacgaaataaaaatagccatcctcatcctgatagcccgaatcaccggtatgtaaccagccctcaggttccagcgctttggcggtagcctccggctgcatgtaatactctttgaagatagtcttgccggggatgcctttaatacagatttcgccaatttctccggcgggcagcgggcgattttgatcgtcgcgaatttcagcttcatagctaaaacccacgcgaccaatggaaggccagcgccgtttgtctccgggacggtcgccaataattccgacaatggtttcagtcataccataagaggtcagcagcctgacgccaaagcgttcggtaaaatcgtctttttcctgctcggataaattgagatagaacatcacttcgcgcaggtgatgctgcctgtccgttggtgcggcgggctggaccatcagcgtgcggatcatcatcgggatgcactcggtcaccgttgcctgatatttacgtacctgatcccagaaggccctggcgctgtacttctctagcagcacaaaggtgctgccggcggaaaaggctggcattgcggcggtacactgacagtcgatatgaaaagcgggcatcaccgtcatgtacacgtcatcatcgcgcagggcgatttgccaggcagagtagtagcctgcaaaacgcaggttgtagtgggtaattaccacccctttaggccgtgaggtggtgcctgaggtaaacagaatttccgccgtatcgtcagtggataacacgggcgtatagcacagcgtggccgactggcgtgcttgtagttgggtaaagtggctcacgccgtcgtcagccggaagctgctcgccaatcagacagatatgattaagcggagtgctattgtcctggcgtatttcacggtacataggataaaactgggcgctggtaaccagcagactcacctggctgttttgcaggatccaggcgctttcttcgcccagtaagcgggcattaatcggcaccataatggcgccgatttttgccagtccaaaccagcaaaagatgaattccggacagttatccagatgcagcgcgaccctatcacccttgcggatccctaaggaataaaaaaggttcgccgtgcggttaatctcttcattgagcgaagcatagctaaactgccgaacgattccctcacaggattcgaaaattaacgccgttttatctccgtacaccccggccaggtcgtcccacatctgacgtaagttttgtccgccaacgatatccatattgctttatccactgaaatcaggcgtgagcgctaaccggaaaaccgattagcgcatcgcgtttaatcctcaactttggccaggcctttgccgaccagttccttaatatctgcttcgctataaccaatgtttttcagaatggcggcggtatccatgccgtgtgacggcatgccacgccagattttccccgggttgtttttaaatttcggcatgatgttcggccctttacaggtgcgaccgtccattgtttgccactgagtaatcgattcgcgggcaacgtactgcgggttaccttccagttccggaatggtgagcaccttcgcacaggcgatattcagttcagcaaaacgcgcctgaacgtcggcgatggtgtgtgttgccagccaggcgtccagtttctcttcgacgagcgggccgtaagggcattccacgcgatggatgagttgtgtgccttccggaacttccggcgtaccgagaatgtgggccaggccaatatctttaaaacactcgttgatttgcgtgatgccgaccaactccatgacgatgtaaccatcggcgcatttatacaggccgcaaccagcgtagtaggggtctttccctttcgtcatacgtggacagatttcgccgccgttgaagtagtccatcatgaaatactgacccatgcgcagcatcacttcgtacatggcgatatcgatgctttcacctttacccgtttcgcgtactttgtgcagggctgccagcgcggctgtcgtcgcggtcatcccggagaagtaatcggcggtatacgggaaggctggcatcggctgatcaacgtcgccgttttggatcagataaccactgaatgcctgcgcgatggtgttatacgccggaagattggtgtactcctcggtaccatactgaccgaagccggaaaggtgggcaatgaccagtttcgggttatgttcccacagcacttcatcagtaataccacggcgggcaaaggccgggcctttactggcttcaatgaaaatatcggtggtttccatcagtttcagaaacgcttcccgaccttcatctttgaaaatattcagcgacagggcgtgcaggttgcggcgtgagagctgcgggtagttaggctgtacgcggatggtatcggcccatgcgacgttttcaatccagataacctctgcgccccattcggcgaacatctgtccggcgaatggaccggcgatttcgattcctgaaaaaacaacgcgtaccccagcaagcgggccaaaggttggcattggtaaatgattcatcatttttctcctggcattttttgcggtatgtaggccggataagcacagcgccatccggcatgattgcctgatggcgacgccccgcgtcttatcaggcctacaagggatcgattagcggtattgcttaagtaccgcacgacccaacgtcaggatctgcatttcatcagaaccaccagaaacacggtcaacgcgcaggtcacgccagaaacgcgtgatgcggtggttgcccgcgataccaacacctcccagtacctgcatggcggtgtctaccacttcaaacgcggcgttggcgcagaagtatttgcacattgccgcgtcgccggaggtaatggtgccgttatccgctttccacgcggcttccagcagcatatttttcatggagttcagtttgatcgccatatgcgcaaacttctcctgaatcagctggaaacggccaatagcttcaccaaactgcacgcgctgattcgcgtaacgcgcagcgtcttcaaaagcgcacattgcggtaccgtagttggtcagcgcgacgaggaagcgttcatggtcaaactcttctttcacgcggttgaagccgttaccttcccgaccgaacatgtctttctcgtccagttcaacgtcgtcaaaggtgatttcacagcagctgtccatgcgcagaccgagtttctccagtttgttgaccttgatacctgctttgctcatgtccacaaaccactcggtgtaaaccggtttatccggcgatgcaccgtctctcgccatgaccacgatgtacggggtataggcgctactggtgataaagcacttactgccattgagataaaccttaccatttttgcgcgtataagtggttttcagactaccaacatccgatcccgctcctggttcggtgatagcagagttccacatctgcttaccggtgccccggaacgccatgattttatcaatttgctcctgagtcccttcacgcaggaaagtgttaaaacctcccggcaattggtacaacacgtaagttggcgcgccaagacgtcccagttccatccagacggcggcgacggtaacaaaacccgcttccagaccgccgtgttcttccgggatcagcaggctatcaatacccatatccgccagcgcttttacaaaacgctcagggtagacgctgtcacgatcgcactcggcaaaataagcttcccagttctcactggccatcagttcgcgaataccggcgacaaacagctcctgttcgtcatttaagttgaaatccatctttcagcctcttgatcaattgggttaataagaattacttgtctttccagtgcactttggcgtctttaataaaggacagcgtcaccataatgttgacgaagaacagcggacatcctccggcgataatcgcggtctgaatcggcttcaacccacccagcgccagcagaacgataccgatgatgccgaccagcactgaccagccgatacgcactaacagaggcggctcttcaccatcgcgaacttcgcgacaggtcgacatcgccagggtgtaagagcaggcgttaatcagcgtgacggtggcaataaagcagaggatgaagaagccccacatggtggcggtgctgagcggcaaggcggcccaggtttcgataatggcgcgcgccacgccgtgttgctcaatcagttgcggaatgttgaggatgcttttatccatcagcagcagcgtgttactgcccagcactgtccacaggatccaggtagacgcggtcagacccatcaccatcccgaagcacagctcacgtacggtacgaccacgggaaatacgggccaggaagatactcatctggatggcgtaaataacccaccacgcccagtagaaaacggtccagccctgcgggaagccgcctttaccgatggcgtcggtatagaacagcatccgtggcaggtgcattaacagcatcccgacggagtcggtgaagtagttcatgatgaagctggcgccgctgacgataaacacccagccgagcatcaggaagctcaggtagctacgcacatcgctggcgattctgacccctttttgcaggccgcaggccacgcaaatcgcgttcagaatgatccagcaggtaatgatgatggcgtcgagttgcagcgtatgcggaataccgaacagccattgcatacactcggtgaccagcggggtagccagaccgaggctggtgcccatcgcgaagatcagcgccaccaggtagaagttatcgacgatggtaccgaacaaccctttcgcatgcttttcaccgacgagcggtaccagcgtggagctggggcggatgacatccatcttgcgtacaaagaagaagtaggcgaaggccacggaaaggaagctataggttgcccacggcagcggcccccagtggaacaggctgtacgccaggcctatctctttcgcgcccgtggaatttggttccaggccgaacggcggggtggagatatagtagtagatctcaatagagccccagaacagaaccgcagcggatgtacaggaggcgaacatcatgaaaatccagctggcggtgctaaactccggtttttcgtcacctaatctctttttggcataggggccaaaaaccagccagaaccagccgaagagcatgacgaccatataccattcaaatgcccaaccccagacgttggtgacataactgaataccgcattaataacgacgttagcggcatcaagatctctgactgttagccagcaaagtatcccgacaattattaatggcggaaaaaaaaccttcggttcaattcccgattttttcttttcatttttcataagtgaattccagtgtgaaaacgaaatttatttagcgtgccagtccatgaacgtttgtttatttattattaatgatttgttgataagtttttaacctctgggacgcctcaatgagtaactcatgatgggtattcacttcgggtgattctgttatctttgtcacacttttttgcgttgattattttgtgtctaaattttgatttttgctttatttatcaattgattggttgtggtttttaacttttttaagtatctggcgttcaatattgttgagccagcaaacaatattgaaaattttcatatttggcatatttctttcaatattggtgaggtgcgtaacactattgaaagttacgaatatcaatgtgtgacattttcaatattggtgattaaggttttatttccgaattaaagagcgtgatatctgtatttaacaccgccgatataaatacgtttccttcatgatttctggagatgcaatgaagataattacttgctacaaatgcgtacctgatgagcaggatattgcgattaataatgctgacggaacactcgatttcagcaaagcggatagcaaaatcagccaatatgatctgaatgcaattgaagctgcttgccagttaaaacagcagttgggagacgctcaggttgtcgccatgagcgttggcggcaaagcgctgactaatgcaaaagggcgcaaagatgtcctctctcgtggccctgatgaactgattgtggtcattgacgatcaatttgagcaggcgctgccgcaacacaccgctaccgcgctggccgccgccgcgcaaaaatcaggtttcgatctacttatctgcggcgacggttcttccgatctttatgctcagcaggttggtttgctggtgggcgaagcgctgaacattccggcgattaacggcgtgagtaaaatcctctctcttaccgacagcacattgacagtagaacgcgaactggaagatgaagttgaaacgctgagcatcccgctcccggcggtgatcgcggtttccaccgacattaacaccccacaaatcccttcgatgaaagccattcttggcgcggcgaaaaaaccggttcaggtctggtcgcctgcggatatcgggctgaacagcgtacccgcgtattccgcacaacaggttgccgcaccgaagcagcgcgagcgtcagcgtgtggtgattgaaggtgacggtgaagaacaaatcgccgcgtttgtcgagaatctgcgcaaaatcatttaattatcaggggatgttatgaacaaattttccagtgtctgggtattcagcgataccccttctcgtctgcccgaactgatgagtggcgcgcaggctgtaggtgaaaaagttaacgcgttcgtactgaacgaagcagacagcgcgacagcatgtcatttgggcgcggatcatgtctggctgctcagcggcaaaccagaagaccgcatgatcgaagactacgctgctgcgatggctgagactattcgtcagcatagcgagggcggcgcggtgctgctgccgaatacgcgtcggggcaagctgttggcggcaaagctgggctatcgcttgtcggctgcggtttccaacgatgccagcgacgtctccctgcaggatggaaaagcggcggttaaacatatggtctacggcggtctggcgataggggcagaaaccatcgcttcgccgtttgccgtgatcacactcagcagcggaacgtttgacgcacaacaaccggatgcttctcgcagcggcgagatgcacaccgtgcagtggcaggctccggccactgccgtgacccgcaccgcaacccaggcgcgtcagagcaacagcgttgacctcgacaaagcgcgtctggtggtcagcgtgggacgcggcatcggcagcaaagagaatatctcgctggccgaagcgctgtgccagacgattggcgccgagctggcctgttcccgcccggtggcggaaaacgagaagtggatggagcacgagcgctacgtcggtatctccaacctgatgctcaaacctgaactgtatctggcggtggggatctccgggcagatccaacacatggtcggcgccaacggcgcgcagacgattttcgccatcaacaaagataaaaacgcgccaatcttccagtatgcagattttggcatcgttggcgatgcgctgaagatcctgcctgcgctgacggctgccttagcgcgataaaccatttcgggcaggatgcgaaggtatcctgccgctgacaggagtacgtatgtccgaagatatctttgatgccatcatcgtgggtgcaggtctggccggttcggttgcggcgctggtgcttgctcgcgaaggtgcacaggtgctggttatcgagcgcggcaattctgctggcgcgaagaatgtcaccggtgggcgcttgtatgcacatagcctggaacgcatcattcccggctttgcggatcaggcccccattgaacgcatgatcacccacgaaaaactcgcctttatgaccgacaacggggcgatgactatcgactactgcaatggtgaagatgcttcagcgtcgcaggtttcctattccgtcttacgcagtaaatttgacgcctggctgatggagcaggccgaagaggcgggggcgcaactgatcaccggtattcgcgtggataacgttgttcagcgtgatggcaaagtcgtgggcgtggaagccgatggcgatattctggaagccaaagtcgtgatcctcgctgacggggtgaattctctgctggctgaaaagctgggcatgaccaagcgtgttgaggcatcgcatgttgctgtcggcgtgaaggaactgatcgaattgccgaagtcggtcattgaagatcgtttccagttacagggcaacgaaggtgccgcctgtctgtttgccggagcgccgaccgatggtctgatgggcggtggcttcctgtatacgaatgaaacaaccctttccctggggctggtctgcggtcttcatcatctgaaagacgcgaaaaaatcggtcccgcaaatgctggaagatttcaaacagcatccggcagttgcgccgctgatcgccggtggcaagctggtggaatatgccgcgcacgttgtacccgaggcgggaatgaatatgcagcctgaactagtgggcgatggcgtactgattgccggggatgctgccggcatgtgtatgaacctcggctttaccatccggggtatggatctcgccatatccgcaggcgaagcggcggcgaagacggtgctttcggcgatgaagcgcgacgattttagcaagcagtcgctgggtgaataccgtcagcatctggacgaaggtccgatgcgcgatatgcgcatgtatcagaaactaccggcttttcttgataatccccgcatgtttaccgcttatcccgaaatggcggtcaatatcgcgcgcgacctgttcaccgtggatggctccgctccggtgcccatgcgtaaaaaaatcctgcgccatgcgaagaaagtgggcttcattaatctgatgaaagatggcctgaaaggagtgaccgtattatgacatctcccgttaatgtggacgtcaaactgggcgtcaataagttcaatgtggatgaagacagcccgcacatcattctcaaaaccgatcctgataaacaggcgctggaggtgctgattaaggcctgtccggcgggactgtataaaaagcaggacgacggcagcgttcgttttgattacgccgggtgcctggagtgcggaacgtgccggatcctcggccttgatacggcgctggaaaaatgggaatacccgcgcgggacgtttggcgtagagttccgctacggctaataagtacgaagttgtgcccccgttggccggataagatgcggtagcgtcgccatccggcaatcatgtggcgccaatgccggatggcggcggaaacgccttatccggcctacagatgcgctttgcccgtgttgaaacaggacatcaccatgcagcagcccaggaactttgatgaccttaaattctcctccattcatcgcagaattatgctgtggggaagcggcggcccgttccttgatggctacgtgctggtgatcattggcgtggcgctggaacaactgacgccgctattgcaccttgatgctgaatggattggcgcgctcggcgcggctacgcttgccggactgtttatcggcacctcgttgtttggctatatttgcgataaagtcgggcggcgtaaaatgttcctgcttgatattatcgctatcggcgttatctccgtggcgaccatgtttgtttccacgccgcttgaattactggtgatgcgcgttttaattggcattgttatcggcgcggattaccctatcgctacttccatgattacggagttttccaacacccgccagcgcgcgttctccatcggttttatcgccgcgatgtggtacgtcggcgcgacctgcgccaacctggtgggctactggctgtatgacatggaaggcggctggcgttggatgcttggcagcgcctttatcccgtgcttaatcattttgattggccgctttgacctgccggaatcgccacgctggctattgcgaaaaggacgggtaaaagagtgcgaacaaatgatgatcaaactgttcggcgaaccggtctgctttgacgatgagctgccgcaggagacccgcttcctgcagctgtttaaccgccgtcatttcccgtttgtactgttcgttgcggctatctggacctgtcaggtgatcccgatgttcgctatctatacctttgggccgcagatcgtcgggttactcggctgggagcaggggcgcaacgcggcgcttggcaatgtggtgattagcctcttttttatgctgggctgtataccggcgatgttctggctaaacagtattggccgtcgccctctgcttattggcagcttcgccatgatgactatcgcgctggcgctgctggggctggtgtcaaatctgggcatcatactggtcgtggtggcgtttgcggtatacgccttcttttccggcggaccgggcatactgcaatggctttatcctaatgaactcttcccgacggatattcgcgcttcggccgtgggggtcatcatgtcattaagccgcatcggaaccattgtctccacctgggcattaccgatttttattactcgttacggtattaataacgtcatgctgattggcgcgttgatttcgttagtcgggcttggcgtatcggtgatgtttgccccggaaacccgcggcttgacgctaacacagaccggaaacatgactttgcgcggaacgccatcggataaccctcgttaagagtgttctgcatttctccctgcttttcgccaataacgctacagttaacagtcacatgctaaaacaactgaaaagcagggagaacaccatgcaaaaacgtcttatgaccgcactgtttaccgcagcaacactattcaccgtcgcaggatgctcttctaaccaggcggttgaaaccacggatggcaaaactattgtcaccgacgggaaacccgaggtcgataacgataccggtatggtgtcttacaaaaacgccgccaccgggaaaaccgaacagattaaccgcgatcagctgaaaaatatgagcgagctggataattaattcaatcttttctggttagccgcgcaataatattttctctttatgcgcatccatttattcccatgcgaataaacggatgcctgaacaggcagggacgccggaaaacgtcgaaatacgttagaccattcgcccgtgttcccgctttccccaccgcgctgtccgcttacatgaggttacactcatcgacatttctctgaacagcggctcaacatttcccggaaaaaaacatatcgcagggcatttatccttatgattaggtataaatgatgaggtataaggaacaggagtctgtaatgaaaccaatacctttttatttgctcgcgctattttctgccgcctccggggctacggagataaacgtctgcaaagacctgatcggaacatggaaaaccacggcagataacccgccttataccatgacaatatcgccgccagtagaaagctgcggggaaaaatgtgtgaaactgaacgtgcagtatgaacttgacgtgactcaccgcaacgcgctttattgccatgaaggacaagagggggtaaaagggcagggacccatggtgatagcatttgaaggggcgtatggtggacacgctattggaacctataaccgacagctgcaattactttgggctggcgtaatatcgaaaaataaaaaggggaaatggataacgaaaatggaaaattactggttcaggcaggtaaaagcgcactaaacatcatcttaaaacagcccgcaaaaccgtcttattcacgaagggcttactgcctgcgcgcgcacattccaacggcttgcctgccccggatgaactgttgataaaaaagagggccagcatccgtttccagacggccctgagtggattgtgacgtaacatggcaccttgctggcgctctcttattatttcatgccagtgccctcgttatggcgcaatcagagctttatttcgtcgcatcgttataaacttcggcaacggcttcaaaattcggaccatgctcacgtgcagcgataatatggtaatattttccgcctttcgcatcggctaattctgacagtttttcgcgtagatcagagggtgaggaaatctgtccgccactctgggacacatttatggtgccgaccttaaccagtttgaagtggctgatttcttgtttagagacctgctctgccgcaagtgtgctgaatgaagcaaccgttgccagtaatgcggcggcaataatgcgttttttcatagttctgttcctgttgcattgatgataaggtttgcgcaatatcagtaatccgtaacgaaattatttatccccttcatacttcaggttgcttatgggttggctacggattactcggcccacccatgggcctcgccctgacgggccgtcgcacgcgacgttcaaatctgctcccggcaaatttgtcgctcacctcagtcacataattatctatgctcccggggactcactcccttgccgcctttaagcaactcgaattattttgggtaataacctcggttgattatctgaaaatagccttatttggtgtgaccgtcttttatcttgttatagtcacctctttatgttgttgtcaatgtaaaataatgcactgccagctaaaaagaaacttaaccccctgtaaataatagtttttatattatttcttttaatggcgtaatttttattgaatcacgcggcaatacgctagttttattcataagcaacataacagaattgagttatgttttaatttcccagagtgatattaccggttgtatgtctatggttgcgcggcctgttactgatagtgtttctttcggggcgattttattgtagcggcatagggtaatcaccgtagctgaagggaaaaggcacgaacacagcactatagagtatgtttaataatgtatttttttatgaagtaatgtctgcagttgtatctctaaaataaaaacaatgaacttttcatctaaataatttttcagtgaattatggttatttattaatatatttctaatttgaaatacaaatcaatttataacacatattcttacccggaaggcattgatacatatccacgcttcctcgtacagtaataaatgaatatgtgataaagttactgactacaggtataataatatgagtaataaaaaaaatctgtccgcagaagagacggatcttacgcgtaggaaactgttaaccagtgccggtattcttgccgcaggcggtatgttatccggcgcggtaaaggctgatgaaaaatgcgccgtcaaggcgaaaccggcgtgggataaaccgtttactggcgaaatcccggaaaaattgccagaaggatataatattctgttagtcgtgaccgaccaggagcgtttttttcctacgtttcctttcccggtacccggcagagagcggctcatgaaaacgggggtgacattctgtaatcatcagaataccagtaatgtctgtacgccttcccgctccgtattgtataccggcttacatatgccccagacaaagatgtttgataatttgggattaccctggatgccttatgaccttgaccccgctcttggaaccacaggtcatatgatgcgggaactgggatactatacggcctataaaggtaagtggcatcttacagaaaaactggagaagcctttgcctgacgaaaaagatgaggatattgatgtcggggatattcctgaaccagaattacataaaattatggaaaaatatggttttgctgactatcacggcatcggcgatattataggccatagtaaaggcggctatttttatgattcaaccaccacggctcagactataaattggttaagatgcaaggggcagcccttgaatgaccaacacaagccctggttcctggccgttaacctcgttaatcctcatgacgtcatgtttattgataccgataaagagggagaaaaggtacagtggcgtggcgagttggatcaggatgataataccctggcgcccacgcagccaccggaaaacgaactttatcaggcaagctggccgaactatccgctgccggcaaacaggcatcaatcattcaatgagcagggaagaccgccggcgcatcttgaataccagacggcgcgcgctgcgctggaagggcagtttcctgatgaagatcgtcgttggcgtaaactgcttgactactatttcaactgtatccgcgattgtgatactcaccttgaccggatattaaatgaacttgatgccctcaagttaactgataaaacgattgttgtatttactgccgatcatggcgaattaggcggaagccatcagatgcacggtaaaggcgcttccgtttataaagaacagatccatgtaccgatgattatttcccacccggcgtaccccggtaataagaaatgtcaggcgttgacctgtcatcttgatatcgcgccgacattagttggactgaccggtttgccggaagaaaaacagcaccaggcgttaggcaaccgcaaaggcgttaattttagcggattgctaaaaaacccggagagcgttgcggttaatgcggtgagaaatgccagcttatattgctatggcatgatcttgtataccgatgcccattatctccaccgcgttattgcgctacaaagagataaacaaaaaacggtggcgcaaatcaagcaggaaatatctcatttgcatcctgatttcagccatcgttcagggacgcgcatgattaacgatggtcgttataagtttgcacgctatttctcgctaagggagcataatacgccggaaacctgggaggatcttattaagtacaacgatcttgaactttacgatcttaaaaatgatcccgatgagaaccataaccttgctgctgataaacagaaatatcaggatctcattcttacgatgaatgaaaaactgaataaaattatcaaagacgaaattggcgtggatgacggcagttttatgccggatgcggcccatgagccgtgggatcttactattgagcaatttaaccgcatggcgaaagattaagagcctggcccattaggctattttattcgtcggcgatctggcatccagcgtgtctggaggttcagatgctgttggcgctgcgcttattgggtctgtatcatcatgtaatggattgatattacagtcattacaggcaaatttagcgcagcgccgcccgacaagaaggccttaaaccgattggtcagcgatttaaggctactatcatcaccgacctttccacaccggatcgcgcttttccgcaaacgcctgcggcccttcgagagcgtcttccggaggcaggacggcgccagctcctggctggcgttaattcaattttttctgattagccgctcaataatattcactattagcctggcgaatttgtcactacactttgtaataaaaaacagatcatcacaggctaatcatgatcctcattatttatgcgcatccgtatccgcatcattctcatgcgaataagcggatgcttgaacaggcagggacgctggaaaacgtcgaaatacgttcgctttatcacctctatcccgatttcaatattgacgttgccgccgagcaggaggcgctgtcgcgcgcgagtcttatcgtctggcagcatccgatgcagtggtacagcgtccctcctttactcaaattatggatggataaagtcctcacccacggctgggcttacggtcatggcggtacagcattgcatggtaaacatctgctgtgggcggtaacgaccggcggtggtgaaaaccactttgctatcggctcccatcccggatttgacgtcctttctcagccgctacaggcgacggcgctctattgcggcctcaaatggctgtcgccgtttgccatgcactgcacgttcatttgcgatgacgacaccttacaggcgcaggcgcgtcagtataaacagcgtttactggcatggcaggaggtgaatcatggatagccatactctactgcaggcgctgatctatcttggttcggcggcgttgattgtgccgattgcggtacgtttgggcttaggatcggtgctggggtatctgattgcgggttgcattatcggtccctgggggctacggctggtgacggacgccgaatctattctgcattttgcggaaatcggcgtcgtgctgatgttgtttgttattggacttgagctggacccgcaacggttatggaagctgcgcgcctcggtatttggcggcggcgcgttacagatgggggtctgcggcggactgattggtctgttctgtatgtttcttggcctgcgttggcaggtggcggaactgattggcatgacgctggcgctttcgtccacggctatcgccatgcaggcaatgaatgagcgtaacctgaccgtttcgcaagtagggcgtagcgcatttgcagtgctcttgttccaggatatcgcggcgatcccgctggtggcgatgattccgctgctggccgccagcggcgcatccaccacgcttggcgcgtttgcgctatcggcgttgaaagtcgcaggcgcgttggcgctggtggtgttgctgggacgctacgttacgcgcccggcgctgcgctttgtcgcgcgttctggtttgcgggaagtgttcagcgccgtggcgctatttctggtgtttggtttcggcctgttgctggaagaggttgggctgtcaatggcgatgggcgcgttcctggcgggcgttctgctggcgagttcggaataccggcatgcgctggaaagcgatattgaaccctttaaggggttgctgctggggctgttctttattggcgtcggcatgtcgattgatttcggcacgctggtggagaatccgctgcgcattctgctgttgttggccggttttctggcaatcaaaatcgtcatgctgtggctggtcgcgaggccgctgggcgtaccggcaaaacagcgtcgctggtttgccgtcttattaggccagggaagtgagtttgcgtttgtggtttttggcgcggcgcaaatggcggatgtacttgagccggaatgggcaaaagcgctgacgctggcggtcgcgctgtcgatggcggctacgccgatttttctggtgctgctgacgcgcatggagaagaccgcgacgggtgaagcgcgcgaggcggatgaaatcgacgaagagcaaccgcgggttattgtggccgggtttggacgatttggtcagatagccgggcgtttgctgctgtcgagcggggtgaagatggtggtgctcgatcacgaccccgatcatatcgaaacgctgcgtaaattcggcatgaaggttttttatggcgacgcgacgcgtatggatttactggaatctgccggagcggcgaaggcggaggtattgattaacgccattgacgatccgcaaaccaatttgcaactgagtgaactggtgaagtcgcatttcccgcatctgcagattatcgcccgcgcccgtgatgtcgatcattacattcgcctgcgccaggctggtgtggcgatgcccgaacgtgaaaccttcgaaggcgcgctcaaaagcgggcgacaggcgctggaggcgctggggctggggcgttatgaagcccgcgagcgcgcggatctgttccgtcattttaatacccggatggtggaagagatggcgaaaggggaaaacgatccgttatctcgcgccgccgcctataaacgtaccagcgcgatgttgagcgaaattattaccgaggaccgggagcatctgtcgttgattcagcgccacggctggcagggaacggctgagggcaaacattccggggaggtcgccgatgaacccgaggtcaaaccgtcaatctaaagtaaaaaatgtgatgttctgcaaactttactgctaattggctgtttttgaactactgtaatgctggcgctccacatcaaatgagtggcgtcgccagcagaacgaaaaattttcgtgctcatcctcttttcgtcagtcgacgaaagattgcgctttacgtatagtggcggcaattttttttgtatcaggaaataattaatgatcagtctgattgcggcgttagcggtggatcgcgtcatcggtatggaaaacgccatgccgtggaacctgcctgccgatctcgcctggtttaaacgtaacacgttaaataaacctgtcgtcatgggacgtcacacctgggagtccatcggacgccccttaccgggacgtaaaaatattgttatcagcagccagccaggcaccgacgatcgcgtgcagtgggtgaagtctgtcgatgaggcgattgccgcttgcggcgatgcgccggaaattatggtcattggcggcgggcgcgtgtacgagcagttcctgccaaaggcgcagaagctttatctgacgcatattgatgcggaagtcgaaggcgatacccattttccggattatgaaccggatgactgggaatcggtattcagtgagtttcacgatgccgacgcgcagaattctcacagctattgtttcgagattctggagcgtcgttaacgctgtagtgccggatggcggcgaaacgccttatccggcctactcttgagccagatgtcgccagatgtaggcctgataagcgtagcgccatcaggcataaacctatcaggcgttgaccgcttcgccttcgcccatatccatctggcggtttgacggctgcacaaaatactgtttatcttcccagcgtaaacaggtcaactccccgccccagcagcagccggtatccagcgcgtaaataccttccggcgtccctttcccttccagcgacgcccagtgcccgaacgcaatactgtaagcctcgctcaccggccccggaatggcgaaccacggcttcagcggcgcaggggcattttccggcgacgctttgctgtacatatccagttgaccgttaggaaagcagtaacgcatacgggtaaaggcattagtaataaagcgtagccgcgccagaccgcttaactccggcgaccagttattcggcatatcgccatacatcgcgtcgaggaaaaacgggtacgagtcactcgacagcaccgcttcaacatcgcgggcgcactcttttgccgtctgcaaatcccactgcggggtaatacccgcatgcgccatgaccagctttttctcttcatctacctgcaacagcggctgacggcgtaaccaattcaacagctcatcggcgtccggcgcttcaagaagcggggtcagccggtctttaggtttgttgcggctaatcccggcgaatacggccaacaggtgtaaatcgtgattccccagcaccaaacgcacgctattgccaagcgatttgacgtagcgtaacacgtccagcgaaccgggaccgcgggcgaccaaatcgccagtcagccacagagtgtctgtgtctggcgtaaattccacttgctgtaataaggcgatcagttcgtcgtagcaaccgtgaacgtcgccgatgagataagttgccattgttataattttagtgaatgagtgtagggacggcgagtcgaaacacggggatgtcgatggtaaaggcgtcgccattttcatcgatcatttcgtaatgaccctgcatggtgcccagcggcgtttcaattaccgcgccgctggtgtactggtactcttcgccaggcgcaatgcgcggctggacgccaaccacaccttcgccctggacttcggtttcacggccatgaccattggtaatcagccagtagcggcccaatagctgcactggcgcccggcccagattgcggatggttacggtataggcaaaaacgtaacgttcatcgtcaggtgaggattgcgcctcaatgtagacgctttgcacctgaatacacactctgggcgaattgatcatgtttaactctccttcaaaggcgcgttttccgacagatagttggccatctggcagtactgcgcgacagagatattttccgcgcgcattgccgggtcaatacccatttccgtcaacgtctcaacgctaaaaagattgccgagactgttacggatcgttttacggcgctggttaaaggcctcggtggtaatacggctcaacacgcgaatatctttaaccgggtaaggcattgttgcgtgtggaaccagacgcaccacggcggagtccactttgggcggcggcgtgaaggcggatggcggcacttcaagcaccgggatcacctgacagtaatattgcgccatcacgcttaaacgaccatacgctttgctgttcggccctgcaaccagacgatttaccacttctttttgcaacataaagtgcatgtcggcaatggcatcagtatagctaaagagatggaacatcagcggggtggagatattatagggcagattgccgaacacacgcagcggttggcccaactgcgcagacagttcgccaaagttcatggtcatggcgtcctgctgataaatagtcagcttcggccctaaaaacggatgggtttgcaaacgcgccgccagatcgcggtcaagttcaatgaccgtgagcttatccagtcgttcgccgaccggctccgtcagcgccgccagaccggggccgatttcaaccatcgcctggcctttttgcggattaatagcagaaacaatactgtcgatcacaaaccgatcgttgagaaagttttgcccgaagcgtttacgggctaaatggccctgatggactcgattattcattgggtattaacaatcattttgatggcgagattaagcgccgtaataaaactgccgacatccgcttttccacggcccgccagttcaagcgcggtgccgtggtcaacggaggttcgaataaaaggtaggccgagcgtaatattcactccccgaccgaatccctggtattttagcacgggcaggccctgatcgtggtacattgccagcaccgcgtcggcattatcgagatatttgggctgaaacagcgtatcagcaggtagcggcccgttgagtttcatcccctgcgcccgcagctcgtcgagcaccggaatgatggtgtctatctcttccgtgcccatatgaccgccttcgcccgcgtgcggattcaggccacagacaagaatgcgcggttcggcaataccaaatttggtccgcaaatcgtgatgcaaaatagcaatcacttcgtgcaaaagcgcaggggtgatggcgtctgcaatcgcccgtagcggcagatgcgtggtcgccagcgccacgcgaagttcttcggttgccagcatcatcacgacttttttcgcctgcgaacgctcttcgaaaaactcggtatgaccggtaaacgaaatgcctgcgtcgttaataacgcctttgtgcacggggcctgtgatcagcgcggcaaattcaccgttcagacagccatcacacgctcgcgccagcgtctctaccacgtaggggccattttctaccgtcaactgaccggagatggcaggcgcgcgcagcgagaccggcaatagggtcagcgttcccgcgggctgcggcgcagcggggacatcaggcgagtaagggagaagcgagagaggcaggccgagcatggcggcccgctccgtcaggagcgcgccgtccgcacagacgaccagttcaatcggccacgcgcgttgcgccagttggacgacaagatcggggccaatcccggcgggttcgccgggagtgataacaacgcgttgcgcactgctcattagttactcaaaatcttaacgtaagcgctggcgcgctgttcttgcatccaggtcgccgcttcttctgagaatttacggttcatcagcatacgataagcgcgatctttctgcgccgcatcggttttgtctaccttacgcgtatccagcaattcgatcagatgccagccgaaagaggagtgtaccggcgcgcttatttggcctttatgcagcttcgttagcgcgtcgcggaacgccgggtcgaaaatatctggcgtagcccaacccaaatcaccgccctggttagcggagcccgggtcctgagagtactctttcgccgcagcggcaaaggtggttttaccactcttaatgtcagccgcgatttcttccagcttcaggcgcgcctgctgatcgttcatgatcggcgacggcttaagcagaatgtgacgagcgtgaacttcggtcacggagatactctggctctgaccgcgcaggtcatttactttcagaatgtggaagccgacgccggagcgaatcgggccgacaatgtcgcctttcttcgcggtgctcagcgcctgggcgaaaatccccggcagctcctggatacggccccagcccatctgaccgccttttagcgcctgctggtcggcagagtaggtaatcgccagtttgccgaaatctgcgccgttacgcgcttcttcaacaatgctttccgcctggcgctgcgcgtcgttaacctgctcggaggttgggttttccggcagagcaatcaggatatggctcaggttcagctcggtgctggcatcgttttgggtgccaatctgttttgccagcgcgtcaacttcttgcggcaaaacggtgatacggcgacgaacctcattgttgcgcacttcagagataatcatctctttacgaatctggttacggtaggttgaatagttcagcccatcgtaagccagacggctgcgcatctgatccatcgtcatattgttttgtttggcgatgttggcgatggcctgatccaactgctcatccgtgatcttcacccccatcttctgacccatctgcaggataatttgatccataatcaaacgttccaggatctggtgacgcagcgtggcgtcgtccggaagctgctgacctgcctgacccgcgttgagtttgactgattgcattaagccatcaacgtcgctttccagcacgacgccattattgacgacggctgcgactttatcgactacctggggggcagcgaaactggtattcgcgatcatggcgataccgagaagcagcgttttccagttcttcatactttttccatttcaattaaccgcaatgcggattacgttgtaaatcaatcagattacatagagctttggtacggcagaatgttcgaacgcaacatttcttgcgtgccgaggccgtagttagagctcaaaccgcgcagctcaatgttgaagccaatcgcgttatcataaatcgcgtgttgtttatcgttatcccaaccgttcagcttacgttcgtatccgacgcggatcgcatagcagcaagagttgtactgcaagccgagcatctggtctgcaggtttgctcgaattggtatcgaagtagtacgcgccgacaatcgaccagcgatcggcaatcggccaacttgccaccgcgcccacctgattgatgccgtttttatactgctctgccgtggaataatacgaaggcaacgtagcctgaatatattccgggctggcatagcggtagttcaactgtaccagacgatcctgatcccgacggtattcgaggctgctgctgctggtagcgacgctatccagacgggtatcgtactgcactccgctacgcagcccccagcgttctgaaatacgccagtaagtgtcgcctgcccaaaccagcgaaccggttttgtcgtcattctcccatttaatgttgtcatcgccggtgcgagactccgtgaaatagtagatttgaccaacagaaacgttaaaacgttcaacggcggcatcatcataaatgcgtgttgtgacgccggttgtgacctggttggcggaagcaatacggtcgagaccgccataagtgcggtcgcggaacaggccgttatagtcggattgcagcaaagaagaatcgtagttatagatgccgctctggtcgcggtacggcacatacaggtactgcacgcgtggttccagcgtctgggtataccccggcgccagcatcgccatatcgcgttcgaagatgagcttaccgtcgactttaaactgcggcatgacgcggttaaccgaatcttccagcttatttttattgtttggatcgctgttatagctgtccagattcgtttgctgatagtgcgtcgccatcagcttcgcttcggtgttcaggctgccccagcggttggagagcggcaaattgatggttggctccaggtggacgcgggtcgcttccggcatattgtctttggtgttaacaaagtgcaccgcctggccgtaaatccgggtatcaaacgggccgagatcgttatggtagtagttaacgtctaactgcggctccgctgaatagctgctggtgttttgatcgttaaagacctggaattgtttggtcgacaccgtagcgtcaaagttttgtacggcgtagccgacgctgaatttctgcgttgcgtagccgtcggtactggaaccgtacttactgtcgaaatcgttaaagtagctggagtcgctgactttggtgtaatcgacgttaaaacgccacacctgatccatcacgcctgagtgctgccagttgaataaccagcggtgcttatcgccctctttggggtgatcgtcctcgtagactttatcagaaggcagataatctaattccatcactccctcgcctgcctgcgtgagataacggaattcgttctcccacataatattgccgcggcggtgcatatagtgcggggtgatggtggcgtccatattgggcgcgatgttccagtaatacggtaagtagaactcgaaatagttcttggtcgtgtatttcgcgttcgggatcaggaaacctgagcgacgcttgtcaccgacgggtagctgtaaataggggctataaaagatcggaaccggacctactttaaaccgggcgttccagatctccgcaacctgttcttcgcggtcatggatgacttcactccccaccacgctccaggtatcggagccaggcagacaggaggtaaagctgccgttttccagaatggtatagcggttttcgccgcgctgcttcatgagatcggctttaccgcgcccctgacggcccaccatctggtaatcgccttcccagacgttcgtgtctttggtgttcaggttcgcccagcccttcggccctttaaggatgacctgattgtcatcataatgcacattacccagcgcatcgacggtgcgtacaggttccggctgaccttccgcctgcttctgatgaagctgcacttcatccgcttgcaggcggctattcccctgcataatgtccacgttgccggtaaaaacggcatcgtccgggtagttacctttagcgttatcggcattgatagtaaccggcagatcgttggtatcgccttttaccagaggacgatcgtagctcggcacgcccaacatacactgtgaggcgagatcggctgccagcccctgatgactataaagggcgctggcgatcatggtggccagaagagtgggaatacgttttttcatacgttgtatttattgttccatcatcggtagcgttgcgcgtgacaaacggtcacagcctaacttactcatcttcgctgcgccagtgttaatcctgccgtttagcgtctgtggtgttaggcacggcattgaatgacaggtatgataatgcaaattataggcgatgtcccacaattgaccgtagccttcatttgcagaaaagcaccttattttgtgggagatagcctcaccgatagcgtaacgttttggggagtctatgcagtactggggaaagataattggcgtcgccgtagccctgatgatgggcggcggcttttggggcgtggtcctgggtctgctggtgggccatatgttcgacaaagcccgcagccgaaaaatggcgtggtttgccaaccagcgggaacggcaggcgctgttttttgccaccacctttgaggtgatgggccacttaaccaaatcaaaaggacgggtgacggaagcggatattcatatcgccagtcagttgatggatcgtatgaatttacacggcgattcacgtactgccgcgcagaacgcctttcgggtcggaaaagcggataattacccattacgtgaaaagatgcggcagtttcgtagcgtctgcttcgggcgttttgatctgatccggatgtttctggaaattcagatccaggcggcgtttgccgatggctcgctacaccctaatgagcgggaagtgctgtatgtgattgcggaagagttaggtatttcccgcgtacagttcgatcagtttctgcgcatgatgcagggcggcgcgcagtttggcggcggttatcatcaacagtccggcggcggctggcagcaggcgcagcgcggcccgacgctggaagatgcctgtaatgtgctgggggttaaaaccaccgacgatgcaaccaccattaaacgcgcttatcgcaaactgatgagcgagcatcatcctgataagctggtggccaaagggttgccgccggaaatgatggagatggcgaagcaaaaagcgcaggaaattcagaaagcgtatgagctaatcaaagaacagaaaggcttcaagtgattgaattgccggatgcggctagcgccttatccggcctacgttaatgaatgtaggccgggcaagcgaagcgccccggcataaattggctcagaatttaaaaatctgccgggactttaaacgtcatgctgttaccgtaagcgggatgggtaatggtcagcatttcggcgtgtaactgcaaacgcggcgccagcgacaacgcttccggcgaggcgtaaaaccgatcgcctaaaatcgggtggcctaacgccagcatatgcacacgaagctgatgcgaacgtccggtgatcggcttgagcaccacgcgggcggtattatccgccgcaaactccaccacgttatattccgtttgcgccggtttgccggtttcataacacactttctgctttggccggttcggccagtcgcagatgagcggtaagtcaaccagcccttccgccggggagggatgaccccatacgcgcgctacatactgctttttcggctcacgttcgcggaactggcgttttagctcccgctccgcggctttggtcagcgccactacaatcacgccgctggtggccatatccagacgatgcaccgattctgcctgcgggtagtcgcgctggatacgcgtcataatgctgtctttgtgcgcttccagacgccccggcacggacaacaggccgctgggcttattgaccaccataatgtgctcatcctgatacaggataaccagccagggttcctgcggcggattgtagttttccatccccatgtacggctccgttattggtgcgtgacgacgataagacgcagcgcgtccagacgccagcctgcctgattcaggctttccagcacctgctgacggttgctgtcgatagcggcaagttcgtcgtcgcgaatgttcgggttgacggcgcgcagcgcttccagacgcgacagttccccggacagtttttcatccgcctcgcggcgcgcgttatcaatcagcgctctggcggacttttcaatctgcgtctcgcccagttgcaaaatggcgtggacgtcctgttgaacggcgttcaccagtttgctaccggtgtggcgattcacggcgctgagctggcggttgaaggtttcaaactcgacctgggcggccagattgttgccgtttttatctaacagcatacgtaccggcgtcggcggcaggaagcggttcagttgtagctgtttcggcgcctgcgcttccacgacgtaaaccagttcgaccagcagcgtgccgacgggcagcgctttatttttcaacagcgaaatggtgctgctgccggtgtcgccggagaggatcagatccagtccgttacggatgagcggatgttcccaggtaataaactgcgcatcttcgcgagacagggctacgtcacgttcaaacgtgatagtacagccgtcttccggcaggccggggaaatccggcaccaacatgtggtcggacggcgtcagcacgatcaggttgtcgccgcgatcgtcctggttaatgccgacgatatcgaacaggttcatggcgaacgcaatcaggttggtgtcgtcgtcctgttcttcaatgctttgtgcaagctgttgggctttttcaccaccgttggagtggatctccagcaggcggtcgcggccctgttctaactgggcttttagcgcttcatgttgctcgcggcaggatttgatcagatcgtcaaacccgtcggtttcttcaggcgcggccagatagttaatcagactggcgtaggctgaatcataaatcgcgcggccggttggacaggtgtgctcaaaggcgtccagcccttcgtgataccagcgaaccagcaccgactgggcggttttttccaggtacgggacgtggatctggatatcatgcgcctggccgatgcgatccagacgaccaatacgctgttccagcagatccgggttaaacggcaagtcgaacatcaccagattgctggcaaactggaagttacgtccttcggagccgatttcggaacataacagcacctgcgcgccggtatcttcttcggcgaaccaggcggcggcgcggtcgcgttcgataatcgacatgccctcatggaacacggcggcgcggatgccttcgcgttcgcgcagcacctgctccagctgtaacgcggtggtcgctttggcgcagatcaccagcactttttgcgaacgatggctggtcagatagcccattagccactcaacgcgtgggtcgaagttccaccaggtgccggtatcgccttcgaactcctgataaatttgttccggatagagcatatcgcgggcgcgatcttccgggcttttacgcgcgcccataatgccggagaccttaatggcggtctgatactgggtcggcagcggcagttttaccgtatgcagttcacgtttcgggaaccccttgacgccgttacgggtgttgcggaacagaacgcggctggtgccgtggcgatccatcagcatcgacaccagctcatcacgggcggcctgcgcatcgtcgcgatcgctattagcggcctgcaacagcggttcaatatcctgttcgccgatcagatcgcccagcctgttcagttcgtcgttgctgagtttattgcccgccagcagcatggccaccgcatcggcgacaggtcggtagtttttctgttcttcgacaaactgttcgaaatcgtggaaacggttcggatccagcaggcgcagacgggcgaaatggctttccatccccagctgttctggcgtggcggtcagcagcagcacgcccggtacgcgttcagctaactgttcgatggccatatattcacggctcggcgcatcggtactccacaccagatgatgcgcttcgtcgaccaccagcagatcccactcggcgtcgcacaaatgttccagacgctgcttattacggcgggcgaaatccagcgagcagatcaccagttgttcggtttcaaacgggttatacgcgtcgtgctgcgcttcggtatagcgttcgtcatcgaacagcgcgaagcgcaggttgaaacggcgcagcatttctaccagccactggtgttgcagggtttccggaacgatgatcaatacgcgttccgccgcgccggataataactgttgatgcagaatcatcccggcttcaatggttttacctaagcccacttcatccgccagcagtacgcgcggcgcgtggcgacgacctacatcatgagcgatattaagctgatgcgggatcagattggtccgctgaccgcgcagaccgctgtatggcatccggtactgctcgctctgaaatttacgggcgcgatagcgcagcgcgaaccgatccattcgatcgatttgaccggcgaacagacgatcctggggcttactgaaaaccaacttgctgtcgagcagaacttcgcgcaacgtcacattggtctcttcggtatccaggcgggtgccgacataaacaagcaggccattttcttcttttacttcatcgatatgtagctgccagccttcatggcttgtaatcgtatcgccagggttgaacatgacgcgggtcacgggagaatcactgcgcgcatacaggcggttttcccccgtggacgggaaaagtaaggtgacggttcgcgcatccatcgcaacaacggttccaagtcccagctcgctttctgtatcgctgatccagcgttgaccaagtgtaaaaggcatatgtgttcggctctatatctttaattgcaggcattactcgccattcccaggcgacagcactggataattgcgagtatacgaccccgctaccaggctaatgtggtagtggcgttaattaggtccaggaatggaaagggcgctatggtactggaaggcggcgctttcgtcacgcgtcaaaataaccccagttgcccggtcagtagtgtagcaaaattatcttcaacgaagggaagaattccttccgccacgggttgtagctggcgggtaagatagtgttcgtaatccagcggcgactgctggtaatccacgggctcggggccgttaacagtccagacatattttatggcgccgcgattctgatactgcgccggacgaccctgcttcaggttttgttcatccgccagccgggcggcgcgaacgtgcggcggaacgttacgttggtactcatgtaaagggcgacgcagacgcttacgataaaccagctgtgcgtccagttcgcccgccatcagtttatcgatagtctcgcgcacatagtcttgataaggttcattgcgaaaaacacgcagatacagctcctgttgaaagcgctgcgccagcggcgtccagtcggtccgcaccgtttccagacctttaaataccatgcgctggctgtcgccttcctgaatcaggcccgcgtagcgttttttactgccagtatccgcgccgcggatggtcggcatcagaaaacggcaaaagtgggtttcaaactccagctccagcgcgctggtcaaattttgctgttgtaacgtctgcgcccaccattcgttcacgtgacgcaccagcctgtgcccgatttccgccgcatcggcttctgaatgcgcgcgccggagccagacgaaagtggaatcggtatcgccataaatcacgtcataaccctgcgcctcaatcagcgctttggtctggcgcataatcgcatgaccgcgcatggtgattgacgacgccagacggggatcgaaaaagcgacaggccgtggtgccgagtacgccataaaaggcgttcataatgattttaagcgcctgcgagagcggtttattaccctgacgtttggcttcatcgcgcccgtgccagatttggctaacaatttccggcaggcagtgcttttctcgtgaaaaccaggcgtcaaggaaaccttcggtactgtgttccggatccggctgcgccatgccttcgaccagcccgacgggatcaatcaaaaacgtgcggataatcgacgggtacaggcttttataatccagcaccagtactgaatcgtataatccgggttgtgaatccattacgtagccgccgggacttgccagcggcggcacttcgccgagattgggcgcgacatagccggcgcggtgcattcgcggaaagtaaagatgcccgaatgcggcgaccgaaccgccgtggcgatcgaccggcaggccgttgatcgtcgcgcgttccagcaaaaacggcatgatctcggttttatggaaaatgcgcgtgaccagctcgcagtctttcaggttgtaggtggcgagggcgggtttatcctgggcaaagcggcgatcgatctcatccatacgatcccaggggttatcaatggattttccttcgccgagcagttcctgcgagacggcttccagcgaaaaagacgaaaaattccagaacgcggatttaagcgcgtcgataccatcgataatgactcgccctctggcctgggcgaaaaaaacgccgtttttgaagccatgttcgcgccactccagttcgctattgtctcgccccagccgtaaagggatacggtagcgttcggcatgtttttgcagcatacgcaggtcgaactgcactacgttccagccgatgatgacatcaggatcatgttcggcaaaccaggcgttgagtttttccagcagctgcgggcggctggcgacatacacaagctcgaagtccagttggtggtcatcgccattcgccgggcccagcatataaacggtacgctggccgcagccttccagaccaatgcaatacagttcgccgtgtcgcgtggtttcgatatccagcgagacccattttagcggcggtcgatagtcggagtggggtttaagacgcgcattgcggataacgccgttgcgcatctcgccgtctacccaaacgggcgacgtaataaaacgctccatcaggtaacgttccggcgggcgtacatccgcttcataaacggtgacgccgttttcgcgcagcagtttctccatccgcataagctggcggtgagtgcggcaatacagaccggataccggctgacgatgaaagtctcgcagctggagcggcgtcaggcgatagtctttttccgcctgtagcagcgaggcggcgcgggaggtctggctggtcggaataaacgccacggactcttgcggcgccagcgttgcctgcacagggccgttgtctgtcgccagccagaaagagacctccgtcccttgcggcgtatcccgccagtgccgggttaaaatgaaacctgcctgcgccacgatgattacctgtctaaaaaattcacgctaattataacctgttttagggggtaatactgttattttgtacaggcatataacgtaaaagccgatatccgctgtaataaaaagtttctcgcagtaagaagcgggtttgcgcccaccaggatttatagcgggtggatcgcgtgggtgatgagcggctatcgataccattatcctgagcgatagttttcagacgcagcatatgcagcggatcgctgaccagtaacgctgtgcgccattgttgttgtcgcagtatctgttttgcgtaacgaatattttcgcgcgtcacggtagagcgctcttcaataaaaattgccttagccggaatccctttttccagaacgtattgacgggctatcgccgcgtcggaaaccgttgcgccagcgccgtagccgccggttaataccaacgcgcggacaatgtgttgttggtaaagccagatggcatgatccagtctggcctgaaaaacgggagaaggcgtttttccgctaacgcctgctcctgcgacaatcgcgcagtcagctacgcgcgtctggttttgctgactgaactgataaatagcgatggcattatggataaacaccgtagccataatgagaattatgcctgccgcgattctgatgatgtagcgatatttcatgaatgagttcgttccccgtgacgggtgtaatggatattttaacgataaaatggcttttagcgtcagatatttttgctgacgtatatttatcaatatatacccaaaataattcgagttgcttaaaggcggcaagggagtgagtccccaggagcatagataactatgtgactggggtgagcgacaaatctgccgggagcagatttgaacgtcgcgtgcgacggcccgtcagggcaaggcccatggatgggccgagtaatccgtagccaacacataagcaactcgaagtatgaagggtataatgatgctggtgtagacagcagatataattatcctataactgctaattttgaatcatttttatttacagtttttacccatgtattagccgttttgtgtcaagtctgttttcatacattaagtatttttcagaaaggcgcttgttcgaatctgttacttatttctcggattaacaaaaaagcgatattttttgtttgttttaattaatgaaaagtgtaacaatttcatttggaacatccgcaccgtcaggtagaaatataatattccaattggccgctatggttaaataaaaatggattacagtgcgaattcgtcgggaactctctgcataatttaatttttattttagaatataattttattttgactttcgggtgcgggtgtttttatcaaaatttgtggtattcgggaatgatcttttatgaatgtgagtatgcaggcgcgtctggtagggaacgaccgttatcttttcgtcaatactcaacgcgctaacccttccataaaaaccgtgagtcgattttttgagtataaaacatggacagaacagatttggcgtaccgagattattgaaaacggcaatgctttttttcactggcaaggacacgacagaaaaaacggacatcgggataccattattaactatctgttaaatgggcaacgctggcagtcaacaatcgaagattatattttcttccatgcgctggaaggaaaagcgtggcagggacattatgacaatattattgaatatgtgagttctgatcattacgtctatcaaagcgcatttgctgaatatatcaccgaccagattcatcaacgcgccccccatgggacgcgtttttagaggcattactgcccgtaataggcttttgcgccgtgtttgcgtagatagtgtttatccagcagggattgctgcatgtcgggcaactgcggcgcaagctggcggcagaagatccccatataggccacttcttccagcacgatggcgttatgcactgcatcctcggcatttttaccccaggcaaacgggccgtgcgaatggacaagcacgccgggcatttgagcggcgtcaatgccttgtttttcaaaggtttcaacaatggcattgcccgtttcccattcatactcgccattaatttccgcctcggtcattttgcgagtgcagggaatcgtaccgtagaaatagtcggcatgggtggttcccgtcgccggaattggctgacccgcctgcgcccagatagtcgcgtggcgcgaatgggtgtgtacgatgccgccgatagtcggaaatgcctggtacaacagacggtgggttggcgtatcggacgacggtttcttatgaccttcaacgacttcaccgctctccaggctgaccaccaccatatcgtcagcggtcatgacgctataatcgacgccggacggcttaatcaccagtacgccgcgttcgcgatcgacggcgctaacgttaccccaggtaagggtgaccaggttgtgttttggcagcgccagattagcttccagtacctggcgtttgagatcttctaacattgttttctccctgccggatggcgcttcgcttatccggcctacgagcgacggtgtgccggatggcgacataaatgccttattcggcctacaggaccgtaggcccggtaaacgcagtgccaccgggcaatccgtttcaccaattaacgtttgaacccgtaatacacctcgttccagcgcagcgcgtccttaaaggccggcagatgggtatcgttatcaatcaccgcgatttcgatatcgtgtatttctgcaaactggcgcatatcgttcagatccagcgcgtggctgaagacggtatggtgcgcgccgccagccagaatccacgcttcggaggcggtcggcagatccggctgcgccttccacagcgcgttagccaccggcagtttcggcagggagtgcggcgtttttacggtgtcaatgcagttgaccagcaggcgataacgatcgccgaggtcgatcaggctggcgacgatcgccgggccggtttgggtattgaaaatcaaacgcgccggatcttccttgccgccaatgccgaggtgctggacgtcgaggatcggtttctcttccaccgcgatggacggacacacttccagcatgtgcgagccgagcaccagatcgttgcctttctcgaagtggtaggtgtaatcctccataaatgaggtgccgccctgcagaccggttgacatcactttcataatgcgaagcagagcggcggttttccagtcgccttcgcccgcaaagccgtagccttgctgcatcagacgctgtacggccagacccggaagctgtttcagaccgtgtaaatcttcaaaggtagtagtgaatgcgtggaagccgccctgttccaggaaacgcttcataccgagttcaatacgcgccgcctcccgcacgttctggcgtttatcgccgtggatttgggtggcgggcgtcagggtatagctgctttcatactcgtcaatcagagcgttgatatcgccgtcgccgatagaattcaccacctgcaccagatcgccgaccgcccaggtattgaccgaaaagccaaatttgatttgcgcggccactttatcaccgtcagtcactgcgacttcacgcatattgtcgccgaagcggcagacttttagctggcgggtatcctgtttagagaccgcctggcgcatccaggcaccgatacgcgtatgggcctctttatcctgccagtgaccggtgacgaccgcgtgctgctggcgcatccgcgcgccgataaaaccgaactcacgaccgccgtgcgcagtctggttcaggttcataaagtccatatcaatgctgtcccacggcagggcggcgttaaattgggtatggaattgcagtagtggtttgttaaggatactcagcccgttgatccacattttggccggggagaaggtgtgcagccagaccaccagccctgcgcagcgatcgtcataattggcgtcacgacaaatggcggtaatctcatccggcgaggtgcccagcggttttaataccagtttacatggcagtttggcttcggtattcagcgcgttgaccacatgctcggcatgttgggtgacctgacgcagggtttctgcgccatacaaatgctggctgccaatcacaaaccatacttcataattatcaaaaatcgtcattgtcgtgtccttaatgagtcaggattgcctgattggccggggtcgttggcgccggcgcggcagtcggaagataatgttgttctgcgcttagcgcccactgctggtagcggcggtaaagctgttcgaagcgttgcgcctgttcagggtgggggcgcagagtgcgttctaccgcgctcgccatgctttgctgggcggctggaatgtcggcatggactttcgcagcgacggcggcaaagatagcggcgcctaatgcgcaacactggtcggaagcgacgatctgcaacggacgattcagtacgtcgcagcagacctgcataatgacctgatttttacgggcgatgccgccaagcgccatcacgttattgaccgcgataccctgatcggtaaaacactcctgaatggcgcgcgcgccgaaggcggtcgaagcgaccagaccgccaaacagcgctggcgcgtcggtggcgagattgagatcggtaatgacgcctttcagacgctgattagcgtttggcgtgcggcgaccgttaaaccagtcgagcaccaccggcaggtgatccagggacggatttttcgcccaggcgtcggtgagcgctggcagtagctgcttctggctggcgttaatctggggtttcagttccgggtgctgcgcggcaagttgctccagcggccagctcaacacgcggctaaaccaggcgtagatatcgccgaaagcagattgccccgcttccagaccgataaagttcggcaccacgctgccgtcaacctgaccgcaaatgcctttcacggcgcgatccccgacgctctgtttatccgcaatcagaatgtcgcaggtagacgtgccgatgactttcaccagcgtattgggctgtgcgcccgcgccgaccgcgcccatgtgacagtcgaacgcgccgccggaaatcactacgctttccggcaagtcgaggcgctgcgcccattcggcgcacagggtgcccacgggcagatcggcggtgaaggtttcgctaaataacgggtagcgcagatgacggttaatgcacggatcgagttcatcaaagaagctcgcgggcggcagaccgccccagctttcatgccacagcgttttgtgcccggcgctgcagcggccacggcggatatcctgcgggcgagtggtgccggaaagcagcgccggcacccagtcgcacagctcaatccacgagacggcggcctgcgcgacggcgctatcctgccgggtgacgtgcagaatcttcgcccagaaccattcgctggagtaaatgccgccaatatagcgggagtagtcgaccttgcctggcttatggcacagacgagtgatttcgtcggcctcttccacggcggtgtgatctttccacagcacaaacatcgcattcgggttctcggcgaactctggacgcagcgccaggacgttaccgtcggcgtcaatcggcgctggcgtagagccggtgctgtcaacgccaatgccaacgacatttgcgcgttgcgcggcgcttaattgtgccagaacggctttcagcgcggcctccattgactccatgtagtcgcgcggatgatgacggaactggttgttcgggccgtcgcaataacggccttcttgccagcgcggataccactctacgctggtggcgatctcgtcgccggtggcgcagtccactgccagagcgcgcactgaatcactgccaaaatcgaggccaattgcaattgccatcgtcttactccatccagaaaaacaggtatggagaaacagtagagagtcgcggcaaaaaccgtcaggcaggatccgctaatcttatggacaaaaatgctaatgctttgcaaagtgtgacgctgtgcaaatattcaatgtggacattccagccatagttatagacacttctgttacttaattttatcgcctgaactgtacgcttttgttacaaagcgcttttcacaagcggggttgatacgtgctttcatcaagcgcaaagtcttgcggagacggaagctctgtcgtcctggtcgatatggacaatttgtttcttctctgaacatcggggggtagagaaatcatggctgaaacgcaaaatgatccgctattgccgggatattcatttaatgcccatctggtcgccgggctgacgccaattgaagcgaatggatatctggatttttttatcgatcgtccgttgggcatgaagggatatattcttaacctgaccatccgcggagagggcgtcattaataataatggcgagcagtttgtctgtcggcctggcgatatattattgtttccgccgggcgagattcatcactatggacggcatccggacgccagcgagtggtatcaccagtgggtttatttccggcctcgcgcctactggcaggagtggctgacctggccgacaatctttgcccagacaggatttttccgcccggacgaggcgcgccagccgcatttcagcgaactgttcgggcagatcatcagcgccgggcaaggggaaggtcgctattctgagctactggcgatcaatctgctggagcagttgttgctcagacgtatggcggtaattaatgagtcgttgcacccgccgatggatagccgtgtgcgcgatgcctgccagtatatcagcgaccatctggcggacagccattttgatatcgccagcgtcgcccagcatgtctgcctgtcgccctcccggttatcacatctgttccgccagcagttaggcattagcgtattgagctggcgcgaagatcagcgtatcagccaggcgaaacttctgcttagcactacgcgaatgccgatagcgaccgttgggcgcaatgttggatttgacgatcagctctatttttcgcgggtatttaaaaaatgcaccggggcaagtcctagcgagttcagggccggatgtgaataaaaagtgaatgatgtgtccacaaagatgtcataagccgtaactattcggataattgacggcttgacgaagggggacggggtaagcagaatccctgcttcatcacgctgacggacacactatgcaagcactgctggaacactttatcacccaatccactctgtattcgctcatcgccgtgttgctggtcgccttcctggaatcgctggcgctggtggggttgattttacccggcacggtactgatggcggggctgggcgcgcttatcggcagcggcgagctcaatttttggcatgcctggctggtgggtattatcggctgtctgatgggcgactggatttcgttctggctggggtggcgctttaaaaagccgctacaccgctggtcttttatgaaaaagaacaagtcgctgctggataaaaccgaacacgcgctgcatcagcacagtatgttcacgatcctggtcggacgttttgtcggtccgacgaggccgctggtgccgatggtggcagggatgctggatcttcccgtggcgaaatttattgggccgaacttgattggctgtttgctgtggccgccgttttatttcctgccgggcattctggcgggagcggcaatcgatattccttccgatatgcagagcggagatttcaaatggctgctgctggcgacggcgttgctgctgtgggtcggaggctggctatgctggcggctgtggcgcagcggcaaagcggcagtcgatcgtttaaccgcgtatttcccccgcagccgtttgctgtatctggcgccgttgacgctcgggatcggcgtggtcgcgctggtggtgctggttcgccacccgctgatgccggtatatatcgatattctgcgcaaagttgtggattactaacgattcctttgccggatggcagcttcgccttatccggcctacaaaatatgggatttgatgcccaatagcgctgaggcgctggcttgaccgcttagtagctcgtctgttttgccttgccacgcgatacgcccgtcggccacgacgattgaccggggcgcaattcgcgccgcatcttccacgctgtgcgagaccatcaacagcgtgagctgtcgctcgcggcagatatcgctgaccaacgtcagcatctcctggcgcagcgcgggatcgagcgcggagaacggttcatccagcagcagtaccggctgttcgcgtaccaggcagcgcgccagcgctacccgctgacgctggccgccggacagttcgcccggtaaacgcgtcatcagactctcaatgcccatctgatgtgcgatagcgtcccgtttttcccgctggctggcgttgagcgttaacccagggtttagccccagaccgatattttgctgcacattcaggtggctgaataaattattctcctgaaacagcattgagaccggacggcgtgagggcggcgtaagcgtatgatcgtcgccggcaatcagtagcgtaccgctggcaggcgcaagaaaaccggcaattaaattcaacaacgtgcttttccccgcgccgctggggccaagaatcgccacctgctcgccgcgttctaccgccagcgtaaaacgcatcggcaaatgatggtaaagccaggtgatatcaatcagttttagcatgtcggcccggtagtttctctatgagggtaaataacgtaaagcagagcagcagcagtatcagcgcggtcactgcgccgtcctggctgcggtaggagccgatctgctgatacagataaaacggcagcgtgcggaaattgtcattgccgaaaagcgcgacgacgccaaaatcaccgatagaaagtacgcaggcaaacgccagcgcctgcgccagcggacgtttcagcgcccgcagttccacgatctttaaccgcgaccagccttcaattcctaatgactggcacagcattccataacgggcggtaatatcgcgcattgggttttccaggacttttagcgcgtaggggattgccatcagcgcattggtgaaaatcacgatgccgtcggcggattccggtaagccaacgctgttattgagcagtaaaaagaagcctgtcgccagcacgatccccggcatcgcgaggatcaacattccgctgagttccagcgtttgtccggcgaatagttgctggcgttggcgtagctcgcggctactccacagcagcatcatggtcagcaccacacacagaacgcccgccgccagcgcaatgcgtagcgatgtccagacagcctgccacagaatgggttgcgccagcacctccggcaggctgcggttgacgccatcgaccaccacggcgaccagcggcggaagcagcagcagcagcgccagcacgattaataaggcgtccgtcagacggctgtggagacgatcgtcaggatcgcgccagccctgcgtcagcgtcatccccggcgcaatcgctttgctcaaccgttggcttagcagtaccagcgccaggcagcagaccatctggattaatgccagcatcgccgcgcgggcgggatcgtagtcataactgagcgcctgaaagatagccagttcgatagtggtggcctgcgggccgccgccgagcgacagaaccgttgcgaaactggcgaagcagagcataaaaatcagcgccgcgacaggcggaatttggcggcgcagccacggccattcgacaaaacggaaaaaatgccagccgcgcataccgagctgggcggcgagctggcgctgctcgccgggaatgctttccaaagattgcagcaacaaacggctcgccattggcaggttaaaaaagacgtgcgccagtaaaatgccctgcaagccgtagggggagaatgtccactgaagccccagcatctgccacagcgaggccagccagccctgacggccatacacgctaagaatgccgaacacggcaaccagtaccggcagaatcagcgtcatggcgcacagacgcagcagcgccagacgtccaggaaaacggcgtcgataaagcgcgcgggcgagaaaaaccgccgggaccacagacagcactgcggacagaaacgcctgccagaatgagaagcgcaccacatgccacaggtagctatcccgccagattgtcgaccacgcgcccgacggcgcattcagccaaagcgccagaaaggccgccagcgagacggttatcatcagcgcggcggcgcacagccccggaatcagccagccgggaattaacggctgacggcgcgttgccattcgctaatccatgcctggcgttgtgctgccacttgttgcggcgtgaattccagcgttgtggcgggtttggccaatgattcaaaccctgcgggtaaggcgacgtccgctaccgggtacatccagttgccggtgggtatggcgttctgaaacgccggagaaaccataaatttgaggaatttctccgccagttccggctgcttactggcgacggtacgcgccgcgacttctacctgtaagtaatggccttcgctgaagttcgcggcggcgtaattgtccttcttctcttcaataatgtgatacgccggagaggtggtgtaactgagcaccaaatcgctttcacctttcagaaataaaccgtaggcctcgctccagcctttcgtcaccgtcaccgttttggccgccagtttttgccaggcctgcggcgcgttatcgccatagactttgcgcatccacagtaacagccccagccctggcgtactggtacgtgggtcctgataaatcacccgccatttttgatcgctctcgaccagttctttcaggcttttcggcggatttttcagcttgcttttatcgtagacaaaggcgaaatagccgtaatcgaatggcacaaatgtgtcgtttttccagccgccgggcaccttgaccgcttcattcgccacgccgcttttggcaaagagtttagtttgcgtggccgcttccagcagattgttgtccagccccaacaccacatcggctttgctgttcttcccctccatccgcaggcggttgagcagcgaaacgccatcctccagcgccaccagtttcagctcgcagttgcaatcggcttcaaacgcttttttcaccgccgggcctggcccccagtcggcggcgaacgagtcgtaggtatagacggtgagaacgggtttggcgaaagcaggcgccgcgcacaggagtaaaagtggaagatatttttttaacactttgcacctcagttaaagagtggcaaaggacttgagaggtagcctcaaatcccttcgccggcattatccggatcaggttcgacgggtattttctcagcgcgcgcatgagcgcggcaccccgttgagttcggcgttagtgtagtgattttgttgccgggcagcaatcaagagctggcgttaaggatctggcggcgcaaaccacgccgatttaaaatcaaaccagccgagggtattcatgcgcagcccgcgcatactgcgctgtccctggataatcagccagtggtggatcaacggcacaatcgctttgttggccagcagttgctggcaccagttcgccaggttcatctcgccagcgcgccactgcgcggcgtcgccctgccagtcgcgcggaatgcagttctgcaagagcggtacttcgcacaagtgcgcgaacagcgagaaatccagcggcagcgtaaagttagcgctattgagccagatatcgctttcgatctcgccggcgtgccattgatcgtagtcgatctcctgaatatgcagatgcacctgatgttcagccagaagcgcgctcatgatacgggcgataacccggtgctcaatgtgttcgcgatagaaggtcagcgtaagggtttccagcccggcgggtttttcgcccgggcctggacgggcgtgatgccagcgcggtaaaagcccataggccgggaaccagagctgctgtagcggttcatcggcatgatagagtaaattggtgggggagaggacgtggcttacccattctctgacctgcggatgtgcgccgcgcggcgttctggcgtcgaatagcaggtaatagcacccctcttccagtcggctttctatcgctttttcaccgccttgtatcggcccttccagcatcaagccgcaggccggttcttcactgatatccggcagtacccagacgttcacttcgtctatcaacgcccgatagccgaagtaatcatcaaaggcgagtatcttgagctggtttggcgtattacgccgcacggcataaggcccggtgccgatagggtggctggcgaaattagccagcgtttcccactcccgcggcaaaatcatcgccgggacctggcccagcagccacggcaaccagcgatccggctgggaaagatgaatatccagcgtccacgcggtaggggagtctatctttgtgatgtgcgagtaaagcggaagcgtattgatacgcgtcagcgaggagatgacatcttccatctccagctcgcggccatgatgaaaatgaatgccggggcgcaggtagaagcgccacagtaaaggggaaatttgctgccagtggtgcgcaatgtccgcttccagttccccgttttcctcatttacccgcgtgagcgaactgaaaatttgccgggcaatatgagtttccgagcgacgtaatgcggttcccggcagaagattgtgcatcggacgatagtaaagaacccgcagaatatgccgcccctggcggaagctgcgtcccagatgggaaatcagcatttgcctgacagcgcttttatcgccgaccagttgtaccagttgatcgattcgatcttgttccagcaggtcttccgcccgctgctgttgcagcgccagtccggtatacaggaacgtcagacgcgaacgctttccgcgtccaacctcggcttcccatgttagccaaccgcgcgcctgcatcgtatttagcagcgtacgcatatggcgacgcgaacagttcagcagatccgccagctcattaagcgtggtgtcttgcgttttaccgtcacaacattgccagagacggataaattgttgttgcaggcgacctgagggcataaaaggggaactccgatgaaaaactcagcaattttattatccctatattaggccaataatatctttcgatgaagcaagaggaagaggtcactatgcgccagttctggttgagatattttgccgcgacggaaaaaacgtcctggctggcttgcctgagcgcaccgcagcgcttaaaaatgctcgcggaactgatgcagtgggaggcgaccgattgaagccaattgcagacatcatgtgtgactgagtattggtgtaggcgatagcctaaaatcacccgccagcagataatatctgctggctttttttatttcggctgtttctggatgacgatgatgggacggcgtttcaacgggatttatacggcggtttctgtggtcacgcaggtggtgaccgggcgagtaaaaatcgtataaaaaatgccggaatatccccggcatgagcgactgatgagtaacccggagcttgatggcgctacgcttatcaggcctacagaatataatggcaaccgggtgatattgcataacctgtaggcccggtaaggcgtcaagggttaccgcataaatgccggttgtttattttcgtaggcggcaatcgcgtcttcgtgctgcagcgtcagcccaatgctgtccagaccgttcaacatgcagtggcggcggaagtcgtcgattttaaagctgtaggttttatcgcctgctttcaccacctgtgcttccagatccacttcaaatttaatgcccggattggctttcaccagggcaaacagctcatcgacctgtgcgtcgctcagggttaccggcagcagttgattattgaaactgttgccgtagaagatgtcggcgaagcttggcgcgatcaccactttaaagccgtaatcggtcaacgcccacggcgcgtgctcgcgtgacgagccgcagccaaagttttcccgcgccaacagtatcgacgcgccttgatattccggaaagttcaacacgaattccggatttggctgttggcccttttcgtccaggaaacgccagtcgttaaacagatgggcgccaaaaccggtgcgcgtaaccttctgcaaaaactgtttagggataattgcatcggtatcgacgttggcggcatccagtgggacaaccaggccggtatgctgggtaaatttctctgccatggtagtttccttatttgatgctgcgaatgtcggcgaagtggccggtaacggcggcagcggcggccatcgccgggctgactaaatgcgtgcgacccccgcggccctgacgaccttcaaagttacggttgctggtggaggcgcagcgctcgcccgggttcaggcggtcgttattcatggccaggcacatggaacagcccggtaagcgccattcaaatcctgcttcgataaagatcttgtccagaccttccgcttccgcctgcgctttcaccggacctgaacccggcaccaccagcgcctgcacgcccggcgcaactttgcgccctttggcgacttccgccgccgcgcgcaaatcttcaatgcgtgaattggtacaagagccgataaagactttatcgatagcaacgtccgttaacggtacgcccggctgtaagcccatataagccagcgctttttcggcgctggcgcgctcaaccggatcgctaaaggaggcgggatcggggatgatgtcggtgacggaaatcacctggcccggattcgtgccccaggtcacctgcggcgcgatctcttctgctcgcagggcgacgacagtatcaaaggtcgcgccgtcatcggttttcagcgttttccagtactcgacggcttcgtcaaaatcgcggcccttcggcgcgtgcaaacgcccttttacgtagttgaaagtggtttcatccggggcgaccagaccggctttggcgcccatctcaatcgccatattgcacagcgtcatgcggccttccatactcagcgcgcggatagcgtcgccgcaaaattcaaccacgtgtccggtgccgccggcgctaccggttttaccgatgatcgccagcacgatgtctttggcggtaatgcccggcgcggcgttgcccgtgacttcaatcttcatggttttagcgcgtccctgtttcagggtttgcgtcgccagtacatgttctacctcagaagtgccgatgccgaaggccagcgcaccaaacgcgccgtgggtggcggtgtgggagtcgccgcagacgatggtcatgcccggcagggtgacgccctgttccggccccatcacatggacgatgccctgatatgggtgattcaggtcatacagctcgacgccgaactcgttacagttcttaatcagctcctgcatctggatacgcgccatttcaccggaagcattaatgtctttagtctgcgtcgagacgttgtgatccatcgtagcgaaggttttccctggctgacgtaccggacgatggtgcgcgcgcagaccgtcaaacgcctgcggagaggtgacttcatgcaccaggtggcggtcgatgtacagcagcggcgtttcgtttggcgcctcaaagaccacgtgggcatcaaataatttttcgtataacgttttggccatgattacaccccttctgcgacatagcgggcgataatatcgcccatctcatcggtactgactgcggcagcgcccctggctaaatcgccggtgcgaacgccctcttctaatgcgcgattgatcgcctgttcaatggccgttgccgcatcgttggcatccaggctgtagcgcagcagcagcgccagtgacaggatctgcgcaattgggttggcgatatttttcccggcgatatccggcgcggagccgccagccggttcatacaggccaaacccttgctcgttcaggctggcggagggcaacatccccattgagccggtgatcatggcgcattcgtcggacagaatgtcgccgaacaggttagagcacagcagtacgtcaaactgcgacgggtctttaatcaactgcatggtggcgttatcgatatacatgtgcgcgagttccacatcgggatacgttttcgcgacatcattgacgatttcacgccacaggatagagctttgcagtacgttggctttatcaatagaggtgactttacggcggcgtttacgcgccgattcaaaggcgatacgggcaatgcgctcgatctcaaagcggtgataaacttcggtatcaaaggctttttcgtactgaccgctgccttcacggccttttggctgtccgaaatagatcccgccggtcagctcgcgcacgcacaggatatcgaaaccgttagcggcgatatcggcgcgcaacgggcaaaatgcttccagtccctgatacagtttcgccggacgcaggttactgaataatttgaaatgtttgcgcagcggcagcagggcgccgcgctccggctggctttccgggggcaaattttcccatttcgggccgccgacggagccaaacagaatggcatccgcctgctcgcacccttcaacggtggctttcggcagtggatgaccatgattgtcgatagcaataccgccgacgtcatagtggctggtggttatacgcatatcaaaacggctgcgtaccgcatccataactttcagggcttgcgccatgacttccgggccgataccgtcgcccggcagtacggcaatatgatagttcttcgacattacacggtttccttgttgttctctttattttgagctttgcgttgcaattctttttcaacttcggcggcgcgccagatattgttcagtacgtgcaccatcgctttggcggaggattcgacgatatccgtcgccagcccgacgccgtggaagcggcgaccatgatggttcacgacgatatcgacctgacccagcgcgtctttgccctggcctttggcgttcaggtcgtatttaaccaactcaacgtcgtagccagtgatgcggttaatcgcctgatagatggcgtcgaccggaccgttgccgttcgccgcttcggccttgatctcttcaccacaggccagcttcacggaagcggtggcgatatcgctggagccggactgcacgctgaagtaatccagacggaaatgctctggttcttcttgctgtttattaataaacgccagcgcttccaggtcatagtcgaacacctggccttttttgtccgccagcttcaggaacgcgtcgtacaggtggtccatgttgtagtctgtgtccttgtaacccatctcttccatgcgatgtttcacggcggcacggccagagcgggaggtcaggttcagctgtatctggttcagaccgatggactctggcgtcatgatttcatagttttcgcggttcttgaggacgccatcctggtggatgccggaagagtgggcgaaagcgccgctgccgacaatcgctttgttggctgggatcggcatgttacagatctggctgacggtctggctggtgcgccagatttcgtggtgattgatgttggtgtgtacgttcatgatgtctttgcgcactttaatcgccatgatcacttcttccagtgcgcagttaccggcacgttctccgataccgttcatcgcgccttcaacctgacgcgcgcccgcatgtactgccgccagcgagttgcctactgctatccctaaatcgtcgtgggtatgaacggagatgatagctttgtcgatattggggacacgttcatacaggccggaaatgattcccgcaaactcaaacggcatggtatagcccacggtatcgggaatattaatggttctcgcgccggcgtttatagcggcttccaccacgcgcgccagatcgtcaacaggcgtccggccagcatcttcgcaggagaactctacgtcatcagtgtaattacgcgcccgcttaaccatgtataccgcgcgttcgataacctcatccagcgtgctgcgcagcttggtggcgatgtgcattggcgaggtggcgataaaagtatggatgcgaaacgcgtcggcgaccttcagcgcctgtgccgcgacgtcgatgtctttttctacacaacgcgccagggcgcaaacgcggctgtttttaatggtgcgggcgatggtttggacggattcaaaatcacccggagaagagaccgggaagcctacttccatgacatcaacacccatgcgctcaagggccagggcaatctgcagcttctctttcgcgctcaggctggcctgtaacgcttgttcgccgtcgcgtaaggtcgtatcaaaaataatgacttgctggctcatgatgtggtccttgtctccaggggcgccttgcgtcaggcataaaaaaacccgcgcaacggcgcgggttttgtttgacttcgagctgacttaatgttgaatgccgcccaccggtctaccgcgcacaataaatgcgttgagtagtagtagcccagtgaaacgaacgatatgtgacattaattcagctccagcgaatgcgttatgcttttagtggtactggatatgccgtttaatgtcaactctattttctgtcgccattgcattttgttgacgatatccggatacgtactttagctaattgtgctgggctgcgcgtccaataaaggataaaagaacgagtggacattcatacttttcattgtttgaaatatttaggcatttttgtttgcaaattggttaggggaatggcctgttaaaggtatgctaaaggtttggtttatctttttgatttgttttatattttaacaaataaccttgtttgcttaatggataaggataaagttattgataaattaatgttaactttttagctattaataatataaacatttaattgaaacttaaatgatcattcacttggtgtatgattgtgtattcgccatagttatggttatattgcttgcgtaatttaaacattatgaatcgcaatggtgtgactcaggacacattacgcttgcgctggcattctatttgtctctgtcagcgtctttatgttttccgaattttaacgctttccctttttcttattttatatgcctggtaaatcatattttcaggaattatttctgccttcagccagaaaaagggagttaagcgtgacagtggagttaaatatgccagaggtcaaaaccgaaaagccgcatcttttagatatgggcaaaccacagcttcgcatggttgatttgaacctattgaccgtgttcgatgcggtaatgcaagagcagaatattacgcgcgccgcccacacgctgggaatgtcgcagcctgcggtcagtaacgccgtagcgcgtctgaaggttatgtttaatgacgaactttttgttcgatatggacgaggaattcagccgactgcccgtgcatttcagttatttggttcagtccgtcaggcgttgcaattggtgcaaaatgaattgccgggatcggggtttgagccgaccagcagcgaacgtgtattcaatctttgcgtgtgcagtccgctggataatatcctgacgtcacagatttataatcgtgtagaaaaaattgcgccaaatattcatgtcgtttttaaagcgtcgttgaatcagaatactgagcatcagttacgctatcaggaaaccgagttcgttattagttatgaagaattccgtcgtcctgagtttaccagcgtaccgctatttaaagatgaaatggttttagtcgccagccgaaaacacccgcgtattagcggcccgctactggaaggcgatgtttataatgaacaacatgcggttgtttccctcgatcgttatgcgtcatttagtcagccgtggtatgacacgccggataaacagtcgagcgtggcttatcagggcatggcgcttatcagcgttctgaacgtggtttcgcagacgcatttggtcgctattgccccgcgctggctggcggaagagtttgcggaatcgctggatctgcaaatattgccgttgcctttaaaactgaatagccggacatgctacctttcctggcatgaagcggctgggcgtgataaagggcatcaatggatggaagatttattagtctctgtttgtaagcgataaaaccgggcagaataaatcagaaacaaattctggtttattctgctttttagcgtatatcaaaaattttatgctgaattaacggtgagcgatgcttttcgtcgctgtgaaaaatagatgaattgctgtaagtctgcatttataagcgattatttattaccaggtgtgattcagacggagtatttctccatttcttctcttcttgcctcctgattattctaaccttccccatctttacgtcattccacccaattgccaggcgtgatagcgagcggttaaggtgtccgtcaaaccgtgatgacaggtataaagtggaggcaagccgtggaaatgttgtctggagccgagatggtcgtccgatcgcttatcgatcaaggcgtaaagcaggtgttcggctatcctggaggcgcagtgcttgatatttatgatgcgctacataccgttggagggatcgatcatgtgctggtgcgtcatgagcaggccgcggtgcatatggcggatggcctggcgcgagccactggcgacgttggcgtggtgctggtgacttccggaccgggagcgaccaatgcgattaccgggattgctacggcctatatggattccattccgctggtgattctttccggccaggtcgccacctcattgattggctatgatgcctttcaggagtgcgacatggtggggatttcccgaccggtggtcaaacatagcttcctggtcaaacagacggaagatattcccctggtgcttaaaaaggccttctggctggcggcaagcggacgtcctgggccggtggtcgtggatttgccgaaagatattttgaatccggcgaaaaaaatgccgtatgcctggccggagacggtcagtatgcgctcttacaatcccacaacatcaggacataaaggacaaattaagcgtgccttgcaaacgctggcgtcggcaaaaaagccggtggtctacgttgggggaggggcgataagcgcggcctgctatgcgccgttgcgccacatcattgaaacctttaacctgccggtggtctcttcattaatgggactgggcgcgtttcctgctactcatcgccagtcgttaggaatgctgggaatgcatggcacttatgaagccaatatgaccatgcataacgccgacgtgattttcgctgttggcgtacgatttgacgaccgcacgacgaataatctcgctaaatattgtccgaacgcgacggtattacacatcgacattgacccgacgtccatatccaaaacggttaacgctgatatcccggtggtgggcgatgcccgcctggtactggaacaaatgctggagctactggcgcaggatgcgccgtctcagccgcaggatgatattcgcgactggtggcagcagatagagagctggcgcgcccgtcagtgcctgaaatatgacgcggaaagcgaaagcattaaaccccaggcggtgattgaaaccctctggcgtctgacgaagggcgatgcgtacgtgacgtccgatgtaggacaacaccagatgtttgccgccctctattacccgttcgataagccacgtcgctggattaattccggcgggctcggcacgatgggttttggcctaccggctgcgctgggcgttaaaatggccctgccgaaagaaatggtggtctgcgtgaccggcgatggcagtatacagatgaacattcaggagctgtcgacagccttacagtatgaactgccggtactggttttgaacctgaacaaccgttatctggggatggtgaaacagtggcaggatatgatctattccggtcgccattctcagtcttatatgcagtcgttaccggattttgtgcgcctggcggaagcatatggccatgtcgggctgcagattaaccgtccggatgagctggaaagtaaactcagcgaagcccttgagcatgtgcgtaataaccgactggtgttcgtcgatgtcaccgttgatggcagcgagcatgtctatccgatgcagattcgcgggggcgggatggacgaaatgtggttaagcaaaacggagaggacctgatgatgcgccggattttatcggtattactggaaaacgaatctggggcgttatcgcgggttatcggcctcttttcgcaacgcggatataatattgaaagcctgaccgtcgcgccgacagacgatccgacgttgtcgcgcatgactatccagacggtaggcgatgaaaaagtgcttgagcaaattgaaaagcaactgcacaagctggttgatgtgctgcgcgtcagcgagctgggacagggagcgcacgttgagcgggaaatcatgctggtgaaaatccaggccagcggctacggacgggaagaggtgaagcgtaatacggaaattttccgtggtcagattattgacgttacgccaacgctgtataccgttcaactggcgggcaccagcgataaactggatgcttttctggcctcgctgcgcgacgtggcgaaaattgttgaagtggcgcgttcaggcgtcgtcgggctttcgcgcggcgataagattatgcgctgagcagattcgccggatgacgacgcgcgtgcgttttatccggtctactggctgatatctggcccaggtccgataagcgtagcgccatcaggcaggtttgccggatatcagccaacaggaattatcgcccaacccaatatcatcggttgggcttttttttgcgaaatccgtggtaacccggaataaaagcggttgccggagtgatcaaactgcgcttagatgttaacgattttaacccatgccgacataaaggttatggtttgtacaatttacacaaggggcaattgtgaaactggatgaaatcgctcggctggccggtgtctcgcgcacaactgcaagctacgttataaacggtaaagcaaagcaataccgcgtgagcgacaaaaccgtagaaaaagtcatggcggtagtgcgtgagcacaattaccatcctaacgctgtggctgccgggctgcgtgctggacgcacacgttccattggtctggtgatcccggaccttgaaaacacgagctacacccgtatcgcaaactatcttgagcgccaggcacgccagcgtggctaccaactgctgatcgcctgttctgaagatcagccggataacgaaatgcgctgcattgagcaccttttgcaacgccaggtggatgcaatcattgtttcaacttcgttaccgccggagcatcccttctatcagcgctgggccaacgatccgttccccatcgtcgcgctcgaccgcgcgctggatcgcgaacatttcaccagcgtggtcggcgccgatcaggatgatgccgagatgttggcggaagagctgcgtaaattcccggcggaaacggtgctttatttgggcgcgctgccggagttgtccgtcagtttcctgcgcgagcaggggttccgcaccgcatggaaagacgatccgcgggaggtgaatttcttatatgccaacagctatgagcgcgaagccgccgcgcagttgtttgagaaatggctggaaacgcatcctatgccgcaggcgctctttacgacatcgttcgcgctattacagggcgtgatggacgtaacgctgcggcgcgatggaaaactgccttcggatttagcgattgcgaccttcggcgatcatgagctgctggattttctgcaatgcccggtactggcggtggcgcagcgtcatcgtgatgtcgcggaacgcgtgctggagattgtgctggcaagtcttgatgaaccgcgtaaaccgaaacccggcttaacgcgtattcggcgaaacctttatcgtcgcggcattctgagccgtagctaaaggaccggcggtaaaagactctctcttctgccgccgtcaaacaaatgcgtatcagtaaaaatatcccttaaataattaagattattccttaaaattatccgaaaattcttttttattacctttcttttgtccgaaatcgtccacattccactaattaagacgtaacgagtcttttcctttgtattgttttgttacaagcaggcaagaaatcgtcgaattaacagccactttttgtctttggcgcgacagtcgctcgtaggcgctggtatagcaggcaccgcacacgttaaacaggcactgttaacacggtgcaatatgtcctaaaatgccgctcgcgtcgcaaactgacactttatatttttctcggattatattgagtccgttttaaacggcggtgggcctttggtttttttcttacaaatattcataacgttaatttggcttgcacgctgggcggaaattaatcaacgcagatattcgccgtaaacattggcttttttacttaggtaagcgttgtgacttgcttgacaagcttttcctccgctccgtaaactccttcgagtgggaatttgtgggataaagtggtaagaaggggtgagactggcatgttccggggggcaacgttagtcaatctcgacagtaaagggcgcctgaccgtgccgacccgttatcgggagcaactgatcgagagcgctaccggtcaaatggtatgtaccattgacatccatcacccatgcctgctgctttaccccctgcctgaatgggaaattattgagcaaaagttatctcgtctgtcgagcatgaacccggtagaacgtcgcgtacagcgtttactgttgggccatgccagcgaatgtcagatggatggtgcaggtcgattactgatcgcgccagttctgcggcaacatgccggactgacgaaagaagtgatgctggttggacagttcaacaaatttgagctgtgggatgaaacgacctggtatcaacaggtcaaggaagatatcgacgctgaacagtcagctaccgaaacgttatcggagcggctgcaggacttgtctctataagatgatggaaaattttaaacacactacggtactgttggatgaagccgttaatgggctgaatattcgtccggatggtatctatattgatggcacatttggtcgcggcggccactcgcgcctgatcctctcgcaactgggcgaagaggggcgcttgctggcgatcgatcgcgatccgcaggcgatcgccgttgcgcagaccattaatgatcctcgcttctccatcattcatggacctttttccgcgctggctgattatgtagccgagcgcgagcttaccggcaagattgacgggatccttctcgatcttggcgtctcttctccgcagcttgacgatgcggagcgcggtttttcatttatgcgcgacggtccgctggatatgcgaatggacccgacgcgcggccagtctgccgccgagtggttacaaacggcggaggaagcggatatcgcctgggtgctgaaaacattcggcgaggagcgttttgccaaacgtattgctcgcgccattgttgagcgcaatcgcgaacagccgatgacccgcaccaaagagctggcggaagtggttgcggcggcgaccccggtaaaagacaaattcaaacatcccgcgacccgtaccttccaggcggtgcgcatctgggtaaacagtgaactggaggagatagagcaggcgctaaaaagctcgctcagcgtactggccccaggcgggcggctttcaatcatcagtttccactcgctggaagaccgtattgtgaaacgctttatgcgtgagcaaagccgcggtccgcaggtaccggcgggattaccgatgacggaagcgcagctcaaaaaactgggcggtcgtgagttacgagcgttaggcaagttgatgccgggtgaaaaagaggtagctgaaaatcctcgggcccgtagttcagttctgcgtatcgcagagaggacgaacgcatgatcagcagagtgacagaagccctaagcaaagtgaagggatcgataggaagcaacgagcgccatgccttgcctggcgtgatcggtgacgatcttttgcggttcgggaagctgccactctgcttgttcatttgcatcattttaacggcggtgacggtggtcacgacggcgcaccatactcgtttactcaccgcgcagcgtgaacaattggttctggagcgcgatgcattggacattgaatggcgcaacctgatccttgaagaaaatgcgctcggcgatcacagccgggtggagcggatcgcaacggaaaagctgcaaatgcagcatgttgatccgtcccaagaaaatattgtagtgcaaaaataaggataaacgcgacgcatgaaagcagcggcaaaaacgcaaaaatcgaaacgccaggaagaacagaccaacttcatcagttggcgttttgcgttgctgtgcggctgtattttactggcgctggtttttttacttggacgcgcggcgtggctacagattatcgccccggatatgctggtgcgtcagggcgatatgcgttcgctgcgtgttcaggaagtctccacctcacgcggtatgattaccgaccgttccgggcgtccactggcggtcagcgtaccggttaaggcgatctgggccgacccgaaagaagttcatgacgccggcggcatcagcgttggcgatcgctggaaagcgctttctactgcgctcaatattccactcgatcagctctccgcccgtatcaacgccaacccgaaagggcgttttatttatctggcgcgccaggtaaatcctgacatggcggactacatcaaaaaactcaaactgccggggattcatttgcgtgaagagtcccgccgctactacccgtcaggagaagtaaccgctcacctcatcggttttaccaacgtcgacagtcaggggattgaaggcgttgaaaagagctttgataagtggcttaccggtcagcctggcgagcgaatcgtgcgtaaagaccgctatggccgcgtgattgaggatatctcctccactgacagtcaggcagcgcacaatctggcgttaagcattgatgaacgcttacaggcgctggtttaccgcgaactgaacaacgcggtggcgtttaacaaggcggaatccggtagcgcggtgctggtcgatgtcaataccggtgaagtactggcgatggcgaatagcccttcctataaccccaacaaccttgccggtacgccgaaagacgcgatgcgtaaccgtaccatcaccgacgtgtttgaaccgggttctacggttaagccgatggtggtgatgactgcgcttcagcgcggtatcgtcaacgaaaatacggtgttgaataccgttccataccgaattaacggccacgaaattaaagacgtggcgcgctacagcgaattaaccctgaccggggttctacagaagtcgagtaacgtcggtgtatccaaactggcgttagcgatgccgtcctcagcgttagtagatacttactcacgttttgggctaggaaaggcgaccaatttggggttggtcggagaacgcagtggcttatatcctcaaaaacaacggtggtccgacatagagagggccaccttctctttcggctacgggctaatggtaacgccgttacagttagcgcgagtctatgcaaccatcggcagctatggcatttatcgcccgctgtcgattaccaaagttgatccgcctgtacccggcgaacgcatcttccctgaatccaccgtacgcaccgtggtgcatatgatggaaagcgtggcgctgccgggcggcggcggcgtgaaggcagcgattaaaggctaccgtatcgcgattaaaaccggtacggcgaaaaaagtggggccggacggtcgctacatcaacaaatacattgcttacaccgcaggcgtcgcgcctgcgagtcagccgcgcttcgcgctggtggttgtcatcaacgatccgcaggcgggtaaatactacggcggcgccgtttccgcgccggtatttggtgccatcatgggcggcgttctgcgcaccatgaacatcgaaccggacgcgctggcaacgggcgaaaaaaatgaattcgtaattaatcaaggcgagggaacaggtggcagatcgtaatttgcgcgaccttcttgctccgtgggtggctggactacccgcgcgagaactgcgagagatgacgctcgacagccgtgtggctgcggcgggcgatctctttgtggcagtggtgggtcatcaggcggacgggcgtcgatatatcccgcaggcgatagcgcaaggcgtagctgccattattgcagaggcgaaagacgaggcgagcgacggtgagattcgcgaaatgcacggcgtaccagtcgtctatctcagccagctcaatgagcgtttatctgcgctggcgggccgcttttaccatgagccatctgaaaacatgcgtctggtggcggtgaccggcaccaatggcaagaccaccaccacccaactactggcgcagtggagccagttgctcggcgaaaccagcgcagtgatgggaacggtaggcaacggactgttgggtaaagtgatcccgacggagaacacaaccggttccgctgtggatgttcagcatgtgctggccagtctggttgcgcagggcgcgaccttcggcgcgatggaagtctcttctcacggcctggtgcagcatcgcgtggcggcgttgaaatttgccgcctccgtgtttactaatttgagccgcgaccatctcgactatcatggcgatatggcgcattacgaggcggcaaaatggatgctttattccacccaccatcatggtcaggcaatcgtcaacgccgatgatgaagttggacgccgctggctggcgtcgctacccgatgcggtcgcggtatcaatggaagggcatatcaaccctaactgtcacggtcgttggctgaaagcggaggcggtggagtaccacgaccgcggagcgacgattcgttttgcttcaagctggggtgaaggcgaaatcgaaagccgcttgatgggcgcgtttaacgtcagcaacttactgctggcattggcgacgctactggcgctgggctatccgttaacggatttgctgaaaaccgccgcgcgtttgcagccggtttgcgggcgtatggaagtgttcactgcgccaggcaaaccgacggtggtggtggattacgcgcacacgccggatgcgctggaaaaagcgttgcaggcggcgcgtctgcattgcgccggaaaattgtggtgcgtctttggctgtggcggggatcgtgacaaaggtaagcgcccactcatgggggccattgccgaagaattcgcggatatcgtcgtggtgactgacgataacccgcgtaccgaggagccgcgcgccattatcaacgatattctggccggaatgctggacgccgggcaggtcagggtaatggaaggccgcgctgaggcggtaaccaatgccattatgcaggcaaaagacaatgacgtcgtgctgattgcaggtaaagggcacgaggattaccagattgtcggcacgcagcgtcttgattattcagaccgcgtgaccgcagcgcgtttgctgggggtgatcgcatgattagcgtaacgctcagcaaaattgccgatgtccttggcgccgaacaccgcggggcggatctcacgctcgatacggtcattaccgacacacggaaagtgacgccgggatgcctgttcgtggcgctgaaaggggaacgctttgatgcgcatgattttgctgataaagcaaaagcgaacggcgctggcgccctgctggtcagtcgtcctctggatatcgatctcccgcaggtgattgtaaaagacacgcgtcaggcatttggccaactggccgcctgggtacgtatgcaggtaccggcgcgggtggtggcgttaaccggttcgtccggcaaaacctcggtcaaagagatgaccgccgcgattcttagccagtgcggaaatactctgtataccgcaggcaattttaacaacgacatcggcgtgccgataacgctgctgcgcttaaaccatgattatgactatgcggtaatcgagttaggcgctaatcaccagggagaaatcgcctggaccgttagcctgacgcgcccggaagcggcgctggtcaataacctggcggcggcgcatctggaaggcttcggctcgttggccggcgtggcgaaagcgaaaggcgaaatctataccggtttgcctgagaacggtatcgcgattatgaatgccgataataatgactggctgaactggcaaagcattattggcgatcgtctggtgtggcgcttttcgccgaatgcggcaaacagcgactttaccgctgcgaatatccacgtgacgtcacacggtaccgaatttaccctgcaaacgccgatgggcagcattgatgtgctgctgccgttgccggggcggcacaatattgccaacgcgctggcggccgctgctttatcaatggcggtgggggctacgctgacggcgattaaagcagggctggcggcgttaaaagccgtacccgggcgtctgttcccgattcagctaagtgaaaaccaactggtactggatgacgcttataacgccaacgttggttcgatgaccgccgcagtgcaggtcctttctgaaatgcccggctaccgcgtgctggtggtaggcgatatggccgagctgggcgcagaaagcgaagcgtgccacctccaggttggtgaggccgcaaaagcggcgggtattgatcgcgtgttaagcaccggaaaactcagtcaggctatcagccacgccagcggcgtcggcgaacattttgccgataaagccgcgctcattgcgcgtttacacgctctgcttcaggagcaaccaatgatgactattttagtgaaaggatcacgcagcgccgcgatggaagatgtggttcatgcgttacaggagaaaggttcatgttagtttggctggccgagcatttggtcaaatattattccggctttaacgtcttttcttatctgacgtttcgcgccatcgtcagcctgttgaccgcgctgttcatctctttatggatgggcccgcgtatgatcgctcgtctgcaaaaactctcttttggccaggtggtacgtaacgatggcccggaatcgcacttcagtaaacgcggtacgccgacgatgggcggcatcatgatcctgacgtcgattgtgatttccgttctgttatgggcttacccgtctaacccgtacgtctggtgcgtgctggtggtattgatcggctacggcattatcggttttgtcgatgactaccgcaaagtggtgcggaaagataccaaagggctgattgcgcgctggaaatatttctggatgtcggttatcgcgctcggcgtggcctttgcgctttatctcgtcgggaaagacacgcccgcgacccaactggtggtgccgttctttaaagatgttatgccgcaattggggctgttttacattctgctgtcctactttgtcatcgtcggtacgggtaacgccgtgaacctgaccgacgggcttgatggtctggcgattatgccgactgtcttcgttgccgccggctttgcgctggtggcctgggcgaccgggaacatgaacttcgccaattacctgcatattccgtatttacgccatgcgggcgagctggtgattgtctgtacggcgattgtcggcgcgggattaggattcttgtggtttaacacctatccggcgcaggtttttatgggcgatgtcggatcgctggcgttgggcggtgcgttgggcattatcgccgtgctgctgcgtcaggaatttctgctggtgatcatgggcggcgtctttgtggtggaaactctgtcggtcatcctgcaggtgggttcctttaaactacgcggacagcgtattttccgtatggcgcctatccatcaccactatgaactgaaaggctggccggaaccgcgcgtgattgtgcgcttctggattatttcgctgatgctggtgctgattggcctggcaacgctgaaggtacgttaatcatggctgattaccaggacaaaaacgtcgtcattattggtctgggcttaaccggactctcttgcgtggacttttttctcgcccgcggcgtgacgccgcgggtgatggatactcgcgtgacgccgccgggtctggataagctgccgcaagaggttgagcgtcacgttggcggcctgaacgacgagtggctcttagcggcggatttaatcgtcgccagccctggtattgctctggcgcatccctctcttagcgctgccgccagcgctggagtggaaattgtcggcgatatcgaactgttttgccgcgaagcgcaagcgccgattgtggccatcaccggctcgaacggcaaaagcaccgtgaccaccttagtgggcgagatggcgaaagcggcgggcgtcaatgtcggcgttggcggcaatatcggtcttccggcgctgatgctgctggatgccgatcgcgaattgtacgtgctggaattatccagtttccaactggaaactacctcaagtttgcaagcggcggcggcaacggtgctcaacgtcactgaagatcatatggaccggtatccgtttggtttgcaacagtaccgggcggcgaaactgcgcgtctacgagaaggcgaaagtgtgcgtagtgaatgccgatgacgcgttgacgatgccggtacgcggggccgatgaacgctgcgttagctttggcgtcaatatgggcgattatcaccttaatcgtcagcagggcgaaacctggctgcgagtcaaaggcgagaaggtgctgaacgtgaaagagatgaagctttccggtcagcataactataccaatgcgttagcggcgctggcgctggcggatgccgtaggtctgccgcgcgccagcagtttgaaggcgttgacgacatttaccggtctggcgcatcgcttccagctggcgttggagcataacggcgtacgttggatcaacgactcgaaagcgaccaacgtcggcagtaccgaagcggcgctaaacggtttgcatgtggacggtacgctacatctgctgctgggcggcgacggtaagtcggcagacttttctccgctgacacgctatctgaccggcgatcgtatccgcctgtattgctttgggcgcgatggcgcgcagcttgccgcactgcgtccggaaatcgcccaacatactgagacgatggaagaggcgatgcgtttgctggcgccgcgcgttcagccgggtgatatggtgctgctgtcgcccgcttgcgctagcctcgatcagtttaaaaattttgagcaacggggcgatgtctttacccgtctggcgaaggagttaggttgatgcgtttatctctcccccgtctgagaatgccgcgcgtaccaggctttggcctcctggcctggctgtttgcggcgcttaaaggctgggtgatggcttcgcgcgataaagacgccgacagtctgatcatgtatgaccgcacgctgctatggctgaccttcgggctggcggcgattggttttgtcatggtgacgtcggcctccatgccagtcgggcagcgcctggcgaacgatccgtttttgtttgccaaacgtgatgcgctctatatcttcctggcattttgtctggcgatggtcacgctacgtttgcccatgaccttctggcaaaaatacagcacgacgatgctgattgcgtcgatcattatgctgcttatcgtgttggtcgtcgggagctcggttaacggggcgtcgcgctggattgcgctggggccgctgcgtattcagcctgcggagtttaccaagctgtcgctgttctgctacctcgcgaactatctggtgcgtaaggttgatgaggtgcgaaataacctgcgcggctttttaaaaccaatgggcgtgattctggtgctggcggtgttactgctggcgcagcctgacctcgggacggtggtcgtactgtttgtcaccacgctggcgatgctgtttctcgccggggcgaaattatggcagttcatcgccattatcgggatgggcatctcggcggtgattctgttaatcctcgccgaaccgtatcgtattcgtcgcgttacttcgttctggaacccctgggaagatccgttcggcagcggttatcagctgacgcagtcgctgatggcttttggtcgcggtgagatatgggggcaagggctggggaattcggtgcagaaactggagtatttgccggaggcgcacaccgatttcatcttcgccattattggggaagaactgggttatatcggtgtggtattggcgcttttaatggtattcttcgtcgcttttcgcgcgatgtcgattggccgtaaggcattggagattgaccaccgtttttccggatttttagcgtgttctatcggtatctggtttagtttccaggcgctggtaaacgttggcgcggccgcggggatgctgccgaccaaaggtcttacgctgccgctgatcagttatggcgggtcgagtctgttgattatgtcgacggccattatgtttttattacgtattgattatgaaacgcgtctggaaaaagcgcaggcgtttacacgaggttctcgatgagtggtcaaccgaagcggttaatggtgatggcgggcggtaccggcgggcacgtgttcccgggactggccgttgcgcatcatttaatggcccagggctggcaggttcgctggctgggtaccgccgatcgtatggaagcggatttagtgccgaagcatggcatcgacattgactttattcggatctccggtctacgcggtaaaggcgtaaaagcgcttctggcggcgccgctgcggatttttaacgcctggcggcaggcgcgggcgatcatgaagcggtttaagccggatgtcgtgctgggaatgggcggttatgtttccggccccggcggtcttgccgcatggtcattgggtattccggtcgtcttgcatgagcaaaacggtatcgccgggctaaccaatcagtggctggccaaaatcgcgaccacagtgatgcaggcgtttcccggtgcgtttccgaacgcggaagtggtgggtaacccggtgcgtaccgacgtactggcgttgccgttgccgcaggtgcgtctggccggtcgtgacggcccgattcgcgtgttggtggtcggcggttctcagggggcgcgagtcctgaaccagacgatgccgcaggttgccgccagactgggcgatacggttacaatctggcatcaaagcggaaaaggcgcgcagctcacggtagagcaggcatatgccggggcgggacaaccgcagcataaggtaacggaatttatcgatgacatggccgccgcctatgcgtgggcggatgtagtggtatgtcgttccggcgctttaacggtgagcgagatcgccgccgccgggttaccggcgatattcgtgccgtttcagcataaagacaggcagcagtactggaatgcgctgccgttagaaaacgccggcgcagctaagatttttgagcagccgcagtttactgtagaggctgtcgccgacaccctggcggggtggtcgcgcgaggcgttgttaaccatggcggagcgtgcccgcgcggtatccattccggatgctaccgagcgcgtcgccagtgaagttagccgggttgcccggacataatttgtggcggtgccttttgcatcgcagggtttttctaccctcaataatttgggttgcaggcaagccaacgcatctgcaatttgaagtatggcgggtattggagttaatggcgtaaagaatgaatacacaacaactggcaaaactgcgttccatcgtgcccgaaatgcgtcgcgttcggcacattcactttgtcggcatcggtggtgctggtatgggcggtattgccgaagttctggccaatgaagggtatcagatcagtggttccgatttagcgccgaatccggtgacccagcagttgacgagcctgggggcgacgattttctttaaccatcgtccggaaaatgtgcgtgatgccagcgtggtcgtcgtttccagcgcaatttccgcggataacccggaaattgtcgcggcgcatgaagcgcgtattccggttattcgccgtgcggaaatgctggcggaactgatgcgttttcgccacggcatcgccattgccgggacgcacggaaaaaccacaacgaccgcgatggtgtccagtatttatgccgaagcggggctggacccgactttcgtgaatggcggactggtgaaagccgcaggcgttcatgcgcgtctgggccatagtcgttacctgattgccgaggcagatgagagcgacgcgtccttcctgcatttgcagccgatggtcgcgatcgtcaccaacatcgaagccgaccatatggatacctatcatggcgactttgaaaatttaaagcagacgtttattaacttcctgcataacctgccgttctacggtcgcgcggtaatgtgcgtcgatgatccggtcatccgcgagttgctgccgcgggtggggcgtcagaccacgacgtatggctttagcgaggatgctgacgtccgcgtagaagattatcagcagatagggccgcaggggcactttacgctgttgcgccagggaatgccggatctgcatgtcacgttgaatgcgccgggtcgccacaatgccctgaatgccgcggcggcagtggcggtagcgaccgaagaaggcatcgccgatgacgctatcctgcgcgcgctggaaagcttccaggggaccgggcgtcgttttgacttcctcggcgagttcccgcttgagccggtgaatggtaaagccgggacggcgatgctggtggatgactatggtcatcatccgactgaagtagatgccaccattaaagctgcgcgagcagggtggccggataaaaacctggtgatgctgtttcagccgcaccgttacacgcgcacgcgcgatctgtatgacgatttcgccaatgtgctgacccaggtcgatgcgctgctgatgctggacgtttacccggcgggtgaagcgccgattccgggcgcggatagccgttctttatgtcgtacgattcgtaatcggggaaaaattgacccgattctggtttccgatccggctcaggttgcgacaatgttagcgccggtgctgacgggtaacgacttgatattagtgcaaggcgcaggaaatgttggcaaaattgcgcgttacttatctgaaatcaagctgaagccgcaaatccaggaggaagagcaacatggctgataaaatcgcggtcctgttgggcggaacctctgcggagcgggacgtttcgttaaattccggcgcggcagtgttggccgggctacgtgaaggcggcattaatgcgcatcccgtcgatccgcaagaggtcgatgtcgcgcagcttaaagcaatgggctttcagaaggtctttattgcgttgcatggccgtggcggtgaagatggcaccttacagggaatgcttgaactgctcggcctgccttataccggtagcggcgtgatggcctcggcgctttccatggataaactgcgcagtaaattgctgtggcagggcgcaggcttaccggttgcgccgtgggtcgcgctgacgcgcgctgagtttgaaaaaggtcttagcgaagaacaaaaagcgcgaatttcggcgctgggtttaccgctgatcgtcaaacccagccgtgaaggctccagcgtcggtatgacgaaagtagtagaagaaaatgctttacagggtgcgttatcattggcttttcagcatgatgacgaaatactgattgagaaatggctgtgcggtccggaatttacagtggcgatagttggcgaagaaattttaccgtcaattcgtatccaaccggcaggaaccttctatgattatgaggcgaagtatctctctgatgagactcagtatttctgccctgccggtttagatgcgtcccaggaagccgcgctacagtctctcgtcctgcaggcatggaaagctttaggctgcacgggatgggggcgtattgacgtcatgctggacagcgatggtcagttttatctgctggaagccaatacttctccggggatgaccagccatagtctggtgccgatggcggcgcgtcaggcgggaatgagcttctcgcagttagtggtacgaattctggagttggcggactgatatgtcgcaggctgcgctgaacacgcgaaacagtgatgaagagacgccttcttcacgccgcaataatggaacgcgtcttgcaggaattttattcctgctgacggtactgtgcaccgtgtttgttagcgggtgggtcgtgttagggtggatggaagatgcgcagcgtttaccgttatcaaagctggtattaaccggcgagcgtcactacacgcgtaacgatgatatccgtcaggcgatactggctctgggcgcgccgggaaccttcatgacgcaggatgtgaacattattcagagccagattgagcgtttgccgtggattaaacaggccagcgtcagaaaacagtggcctgatgaattgaagattcatctggttgaatatgtgccgattgcgcgttggaatgatcaacatatggtcgatgctgaagggaacaccttcagcgtgccgtcagaccgcatcggcaaacaggttttacccatgttgtatggcccggaaggcagcgcgagtgaagtgttgcagggataccgcgagatggggcaggtgctggctaaggataaattcactctaaaggaagcggcgatgaccgcacgtcgctcctggcaattgacgcttaataacggcattaagctcaatctcggcaggggcgatacgatgaaaaggttggctcgctttgtagaactctatccggttttacagcagcaggcgcaaaccgatggcaaacggattagctacgttgatttgcgttatgactcaggtgcggcagttggctgggcgccgctcccccctgaggaatctaatcagcaacagaatcaggcacaggcagaacaacaatgatcaaggcgacggacagaaaactggtagtaggactggagattggcaccgcgaaggttgccgctttagtaggggaagttctgcccgacggtatggtcaatatcattggcgtgggcagttgcccatcgcggggtatggataaaggcggggtgaatgaccttgagtcagtggtgaaatgcgttcagcgcgccattgaccaggcggaattgatggccgattgccagatctcctcggtatatctggcgctttccggcaaacatattagctgtcagaatgaaattggtatggtgcccatttccgaagaggaagtgacgcaagaagatgtggaaaacgtcgtgcatactgcgaagtcagtgcgcgtgcgcgatgaacatcgcgtgctgcatgtgattcctcaggagtacgccattgactaccaggaaggcattaaaaatccggtcggtctttccggcgtgcgtatgcaggcgaaagtacatttgattacctgccacaacgatatggcaaaaaacattgtcaaagctgttgaacgttgtggtctgaaagttgaccaactgatatttgccggactggcggccagttattccgtgttaacggaagatgaacgtgaactgggcgtctgtgtcgtggatatcggcggtggtacaatggatatcgccgtttatactggcggcgcgctgcgtcataccaaagtgatcccttacgcggggaacgtggtgaccagcgatatcgcttatgcctttggtacgccgccgagcgatgctgaagccattaaagttcgccacggttgcgcgctgggttccattgtcggtaaagacgagagcgttgaagtaccgagcgtaggcgggcgtccgccgcgcagcctgcaacgccagacgctggcggaagtgattgagccgcgttacaccgagctgctcaatctggtcaacgaagagatattgcaattacaggaacagcttcgccaacaaggggtaaaacatcacctggcggcggggattgtgttaaccggcggcgcggcgcaaatcgaagggcttgctgcttgcgctcagcgcgtgtttcatacgcaggtgcgtatcggcgcgccgctgaatatcaccggtctgacggattatgcccaggagccgtattactcaacggcggtgggattgcttcactacgggaaagagtcccacttaaacggtgaagcagaagtggaaaaacgtgttacggcatcagttggctcgtggatcaagcgacttaatagctggctgcgaaaagagttttaatttttatgaggccgccagatattacggcctcaggcgacaggcacatgacggagagagattatgtttgaacctatggaactaaccaacgacgcggtgattaaagtcatcggcgtcggtggtggcggcggtaacgctgttgaacacatggtgcgcgagcgcatcgaaggtgttgaattcttcgcggtgaataccgacgctcaggcgttgcgtaaaacggcggttggccagaccattcaaattggtagcggcattaccaaaggtctgggcgctggcgctaacccggaagtcggtcgtaacgcggcggacgaagaccgtgaagcgctgcgtgcggcgcttgaaggcgcagacatggtatttatcgcggcaggcatgggcggcggtaccggaaccggcgcggcgccagtggttgctgaagtggcaaaagatttaggtattctgaccgttgccgtggtgactaagcctttcaattttgaaggcaaaaagcgcatggcatttgcggagcagggtatcaccgagctgtccaagcatgtggactcgttgatcaccatcccgaacgacaagctgctgaaagtgctgggccgtggtatctccctgctcgacgcgttcggcgcggctaacgacgtgctgaaaggcgcggttcagggcatcgcagagctgatcacccgcccgggtctgatgaacgtcgactttgctgacgtgcgtaccgtgatgtctgaaatgggctacgcaatgatgggctccggcgtggcgagcggtgaagaccgtgcggaagaagcggctgaaatggctatttcttctccgctgctggaagatatcgacctgtccggcgcgcgcggcgtgttggtcaacattactgcgggcttcgacctgcgtctggatgagttcgaaaccgtcggtaacaccatccgtgcctttgcatcggataacgccaccgtggttatcggtacttctctggacccggatatgaacgacgaactgcgcgtgaccgttgttgccactggaattggtatggacaagcgtcctgaaatcactctggtcaccaataaacaggtgcagcagccggtgttggatcgttatcagcagcacggtatggcgccgctgacgcaggagcaaaaaacggtcgcgaaagtggttaacgacaatacaccacaggcggcgaaagagccggattatctggatatccccgcattcctgcgtaagcaagctgattaagaattagctggaatttgggattctgggctctttgtgctaaactggcccgccgaatgtatagtacacttcggttggataggtaatttggcgagattatacgatgatcaaacaaaggacacttaaacgtatcgttcaggcgactggcgtcggtttacacaccggcaaaaaagtcaccctgacattacgccctgcgccggccaataccggggtcatctatcgtcgcaccgacttgaatccaccggtagatttcccggccgatgccaaatctgtgcgtgataccatgctctgtacgtgtctggtgaatgagcatgatgtacggatttcaaccgttgagcacctgaatgctgctctggcgggcttaggtatcgataacatcgttattgaggttaatgccccggaaatcccgatcatggatggcagtgccgctccgtttgtctacctgctgcttgatgccggtattgatgaactgaactgcgccaaaaaattcgtacgcatcaaagagactgttcgggttgaagatggcgataaatgggctgaattcagaccgtacaatggttttacgttggatttcaccatcgactttaaccatccggcgatcgattccagcagccagcgctacgcgatgaacttctctgcggatgcgttcatgcgccagatcagccgtgcgcgtaccttcggttttatgcgtgatatcgaatatctgcagtcccgcggcctgtgcctgggcggcagcttcgattgtgccatcgttgttgacgattatcgcgtattgaacgaagacggcctgcgttttgaagatgaattcgttcgtcacaaaatgcttgacgcgatcggtgacttgttcatgtgtggtcacaatattattggtgcgtttaccgcgtataaatccggtcacgcattgaataataaattgttacaggcagtcctggcaaaacaggaagcctgggaatttgtgaccttccaggacgacgcagaactgccgttggctttcaaagcgccttcgacggtactggcataacgacatacgctgtcgtataaaattcgactggttaacctggcactctctccggccaggcgagccagtcgttttttttactatcctttatctgcgctttccttaatacagccattttgacagggttaaatggaaacacggcgcgttcgctgttttcttagccgattttcaccttagcttctcgtcattactgctgtagcgcgtacgctttaatgataagatttgtgcgcaaattgttttgattccgtaagcccatgaggggcatatcaggtggcaatgacgtgagtggaatactgacgcgctggcgacagttaggcagacgatacttctggccgcatctcttattagggatggtcgcggcgagttttggtttgcccgcgctcagtaacgccgctgaaaccaatacgcctgcaaggacgaccgccagcaccgcgtctaaagttaactttagccattttgcgctgttagaagcctctaaccgtcgtcccaatttcaccgtagattactggcatcagcacgctattcgcacggtgattcgccacctttcttttgcaatggcgccgcaaacgctgcccgttgccgacgcgccgtcgccattacaggcgcatcatatcgccttactgaatacgctcagcgcgatgctcacgcaggagggcacgccgccggcgattgttcgtcgcctctccctggcgtattttgcgccacaaaccgcatttagcatcccggcctggataagtcaggcgcagggtatccgcgccggtccgcaacgtctcagctaacgaaaaaagacccttttactttatttgtagctccgcggcgcggggcatttgagactttattatgctaatcaaattattaaccaaagtattcggtagccgtaacgatcgtacgctgcgtcgtatgcgtaaggccgtcagccttattaatgcgatggaaccggagatggaaaaactctccgatgacgaactgaaagcgaaaaccaacgaatttcgcgcccgtattgaaaaaggcgaaagcgtagagagcctgattccggaagcgttcgcggtggtgcgtgaagccagtaaacgcgtctttgggatgcgtcacttcgacgttcagctattgggtggtatggtgctcaacgatcgttgtatcgccgaaatgcgtactggtgaaggtaagacgctgaccgcaacgctgccagcctacctgaacgcgctgtccggcaaaggcgttcatgtggtaaccgtgaacgactatttggcgcagcgtgacgccgaaaacaaccgtccgctattcgaattcctcggtatgtccgttggtatcaacctgccaggtatgcctgcgccagccaaacgtgaagcttacgctgccgacatcacttacggcactaacaacgaatacggttttgactacctgcgcgacaacatggcgttcagcccggaagagcgcgtgcagcgtaaactgcattatgcgctggtggatgaggtcgactccatcctgatcgatgaagcgcgtacgccgctgatcatttccggcccggcggaagatagctcggaaatgtacaaaaaagtgaacaaaatcattccgcacctgattcgtcaggagaaagaagattctgacactttccagggcgaaggccacttctccgttgatgagaaagcgcgccaggttaacctgaccgaacgcggtctggtgctgattgaagagctactggtgcaagaaggcattatggatgagggcgagtcgctctactcgcctggcaatattatgctgatgcatcacgtcaccgccgcgctgcgcgcgcacgcgctgtttacccgtgacgtggattacattgtgaaagacggcgaagtcatcattgttgatgaacataccggtcgtaccatgcaggggcgtcgctggtctgacggtctgcaccaggcggtagaagcgaaagaaggcgttgaaattcagaatgaaaaccagacgctggcgtctatcaccttccagaactacttccgtctgtatgaaaagctggccggtatgaccggtacggcggatactgaagccttcgaatttagctctatctataagctggacaccgtcgttgttccgaccaaccgtccgatgatccgtaaagatttgccggatctggtctacatgaccgaagcggaaaaaatccaggccattatcgaagatattaaagaacgtaccgcgaacggtcagccagtgctggtcgggacgatttctatcgagaaatctgaagtggtctccagagagctgaccaaagcgggcatcaaacataacgtactgaacgcaaaattccacgccaacgaagcaggcatcgttgcgcaggctggttatccagcggcggtcactatcgctaccaacatggcgggtcgtggtactgatattatgctgggcggtagctggcaggcggaagtcgccgcgctggaagcgccgacggaagaacagattgcgcagattaaagcggactggcaggtacgccatgacgcggttctggctgccggcggtctgcatatcattggcaccgagcgccatgaatcccgccgtatcgacaaccagctgcgtggccgttccggtcgccagggcgatccgggttcttcccgtttctacctgtcgatggaagatgcgctgatgcgtattttcgcctccgatcgtgtctccggtatgatgcgtaaactgggaatgaagccgggcgaagcgattgagcacccgtgggtgacgaaagctatcgctaacgcgcagcgtaaagtagaaagccgtaacttcgatattcgtaagcaactgctggaatatgatgatgtggcgaacgatcagcgccgtgcaatttatacccagcgtaacgaactgctggatgtgtctgacgtgagcgacaccattaacagcattcgcgaagatgtctttaaggcgactatcgacgcctacattccgccgcagtcgctggaagagatgtgggacatcccgggtttgcaggaacgcctgaaaaacgacttcgacctggagatgccgattgccgaatggctggataaagagccggagctgcatgaggagacgctgcgtgagcgcatcctggcgcagtccatcgaggtgtatcagcgtaaagaagaggtggttggcgctgaaatgatgcgtcatttcgaaaaaggcgtgatgctgcaaacgctcgattccctgtggaaagagcatctggcggcgatggattacctgcgtcagggtattcatctgcgtggctatgcgcaaaaagatccgaagcaggaatacaagcgcgaatccttcgctatgttcgccgcgatgctggaatcgctgaaatatgaagtaatcagtaccctgagcaaagtccaggtacgtatgccggaagaggtcgaagcgatggaaatgcagcgtcgcgaagaggcggagcgcctggcgcagatgcagcagctaagccatcaggatgacgatgccgccgtggctgccgatctggccgcccaaaccggcgaacgtaagattggacgtaacgatccttgcccttgcggttctggtaagaaatacaaacagtgtcacggtcgcctgagctaatgcgataaacttaccggcctgataagacataatgtgttgccatcaggtcagtactggcattattgccgaagggcgctacgcttattcggcctggcattgaacacagataaaaaggcgcaggcgactgcgccttttttatggatgcaacaagatgaaaaaactgcaaatcgcggttgggattatccgcaacccgaacgacgaaatttttattacccaacgcgccgctgatgcgcatatggcgaacaagctggaatttcccggcggaaaaattgaagccggcgaaacaccagagcaggcgttgatccgggagctacaggaagaggtggggattacgccaacacaggtgacactattcgacactctggaatatcaattcccggatagacacattacgctgtggttttggctggttgaacgctgggagggcgaaccgtgggggaaagaaggacagccgggacggtggatcgcgcagaacgcgttgagtacggacgattttccgccggccaatgaaccgattattcgtaaattacgccaatttgcgctttagtgggggatcgcaacacgatccccatcgatcttattagcgatttaatgtcgacataatttccggccagtagcgggggccggccgcggcgtcgtgaggaaaaaccgcctcaattgccgtcagctcctgcgggcttagggtcagtgataacgcgccgaggttttcatccaccctggcgcagtggcggctacgtttctgttatagcctaatctcgccggtttatttgtattatcccggccgcgcgcatatggcaccaaaactacgcgtatttattgattatttttgtcataaggcgatattgccgtctcaacagagccatcaccgttagcgctcttcgctccagtcgtcgctatcagactgatcgccgctgctggcgattcgtttctcttcggcggcccattcgcccaaatcaattaactgacagcgtttagaacaaaatgggcggaaggggctaatttccccccagacgaccggtttaccgcaggtcggacagtttacgacggtcacgtcagacatttttactccttagcaacaggccagttcaaaatcaagacgctccggcaccagaccattttcactatccagcggcataaagcgaatggcaaaacggctcttatggccggaaatttgcggataaagttgtgaatcgagcgtcagcataagacgcagcaaatcggcgtcgcccccgttatcctgataaaaaccgttcaggctggtttgcttacggaaaggcgctgaattacggatcagatcaagcaccagcgtcagcgcctgggtgaggggattcaggctggcaagccagctttcaatctgggcatcgcgctgcgcctgttgtaggtgcaaccagatatgcagagtgggtaaatcgaaactgcaacagccgccaggaatacttaagcgttgacgcacaagagcaatcaagcgatcttcgcgtagctgctggccaatcctcggggcggagatcagcacgctgcccgccgattttaactgctggcgcagggcttcaatacggtcttgatcgacgccgggaacctcaacccaggcctgtaatttacgctgctggcgctccagttctttcagcagttcggtacggacttcgccccgttcgaacacatccagtagatcgctgatattacggaaaaaatgcagtgcgccagcatggtctgcaattggcaggttgatggagagctgttggatcaaaaactctatgcgcagccacgtacgcatcttctcattgagagggtgttcaaataggacctgggtgtgcattacggtttttcctgtgagacaaactgcgacgcgagcttaagataactggcgtgcaggcgggccacatctgatgcgatagcatccggtgcgccgttattatcaataacatcgtccgccacggcaaggcgcgcttcacgcgtcgcctgcgcagcgagaatgtgttcaacatgctcgcgcgtaacatcatcacgctgcattgtgcgtatgagctgcgtttcgggcgtcacgtcaaccaccagtacgcggttggctttttgatacagcctgttttcaaccagcagaggcacaacccataacacatagggcgacgtagcctgctgaaactgtcgttgggtttcctgctgaattaagggatgaagcagagcgttaagccaggctttttcttccggatgcgaaaaaatacgctcacgcagcgcccggcgacgtaacgtgccgtcggcggcgataagttcagaaccaaaatgttccgctattgcgttcagggcgggctgccctggctcaaccatctggcgcgcgataatatccgcgtcgatgacggttattccgaggtcagcgaaggcatcagcgacggtacttttaccgctgccaataccgccggttaaggctacggtatacctcatatctccagcttccggaattttagtttgataatcaaaaggttaaattttaaacatacaaagacgatacgctctgagcattaacctactattcgccaggtaaatttatgggattgtaacgtaaaaaaagagaatttcgcagtcttgtacggccatgattagtgcgtatgatagcgtcactggagttgtgagtttcgatttttcgccattaaccccaggaatccgtacatgcgtattgaagaagatctgaagttaggtttcaaagacgttcttatccgtcctaagcgttctaccctcaaaagccgttccgatgtcgaactggaacgtcaattcacctttaaacactcaggtcagacctggtctggcgtaccgattatcgcggccaatatggataccgtcgggacgtttgaaatggcgcaagcattggccgggtttgatattctgactgctgtacataaacattataccgttgaagaatgggcagcttttatcaacacggcctcggctgatgttctgaagcatgtgatggtttccaccgggacctctgatgctgatttcgaaaaaaccgtgcagattctggcgctgaatcctgcgctgaactttgtctgtattgatgtggccaatggctattcagaacattttgtgcagttcgtcgcaaaagcgcgtgaagcatggccgacaaaaacaatctgcgcaggcaatgtggtaacgggcgagatgtgcgaagagcttatcctctccggcgccgatatcgtgaaagtgggaattggtcccggctccgtatgcacgacgcgtgtaaaaaccggcgttggttatccgcaactgtcggcggttatcgaatgtgctgacgcggcgcatggcctgggcggtatgatcgtcagcgatggcggctgcaccatgccaggcgacgtagcaaaagcctttggcggcggcgcggatttcgttatgttgggcggcatgctggcggggcacgaagagagcggcggcagcgtggtagaagagaacggcgagaaatttatgctgttctacggcatgagttcggaatctgcgatgaaccgtcatgtcggcggcgttgcgaaataccgcgcggcagaaggtaaaacggttaaattgccgctgcgtgggccggtgggcaatactgcccgcgatatcctgggcggtctacgctcagcctgcacttatgtcggcgcgtctcgcctgaaagagttgaccaaacgcaccacctttattcgggtgcaggaacaagaaaaccgcattttcaatagcctctaatattctggctggcgtaaatgtgcgccagccttatcccatcccgctcatcgcgtctcccagatgaaaaatcggcaaatacatcgccactaccagcgtaccgataattaagccggtgatgatcaataacgccggttccaacagcgacgccagattatcggccagcgccagcgtagtttcactgtggtgacgggcaaggttatgcagcatgatatcgagtgaaccggacgcttcgcccgttctgaccagttgcaggcatagcggactaaattcctgggtattttttagcgccaaccagaccggattgcccgcggcgatctcctgatgtacctgcgttaaacgctgtgaccagtaagggcagccgagactatcgatagcgctttccagtccctgaagaaaaggaatacctgcgctttgggttaatgccagtacggtgaatatttgcgctagtttctggcctcttatcaggcgacccataacgggaagccgtagcagaagacgctgccgctgcgcttgccaggacggcttttgttttaccctgcggtgagcgatagcaacgagcatcgtcaggaacaagatgagccaaccccatgccgacccccattgcgctatcgcaataataccgcgtgtcagaagaggaagcggggtattgaagctacggtaaatggcggcaaattccggcaggacaaagtgcagcatggcgaaaacgaccagggcggccattgttagaataatggcgggatagcgcagcgcctttttcacgctaaccgtaatctgccgttgcgctttttgctgacgggccagttcaaagcagcattcggccagtttgccggtcagttctccggtgcggatcatcgtctggtagagcggcggaaatacctgcggccaggagactaatgcgctggaaaaagggacgccctgttcaagctcgtgagccagcgtgcgcaacagcgcttgccattgtcggtggggatgctgtttcgcaaggagttccagcccttctgaaagcgtcagcccggcatgaatgagcgtggccaactgatgaataatttcagcgctttgctcttctttccacagtgcggcgttaacgcccatgcgcttgatgcgaagcggcataatgcgctgatgttgcagggtgatgatcagcgccagacgattgtccgcccatacaacgtcttgttccagttgacctttatcgttaacgccttgccagcgccagagctgtttaacgctcatggggcattcccagaacgcgcagtatctcttcaaaggacgtcatgccttgctcaacggcgcgacagccattttcaaaaagcgtccctgtaccggtctgttggaggtgggcttccagtgcttgcgccgatgcgccgctcgcaattaactgacgtaatgccggggtaacggttaacacttcgaataacgcggttcggccataaaagccgtggtagcaatgctgacagccgcttgcctgccagcgcggtatcgcgctgggccaaagattgggcgatagcaccacgggatcgctcagacgctgtttgcagtgcgggcaaagcttccttaccaggcgttgcgctaccaccagcgtaagcgccgatgagatcatccagcgtgctacgcccatttgctgcaaacgtatcagggtttcgctggtggagttcgtatggagcgttgaaagtaccagatggcccgtttgtgccgccttaatggcgatttctgcggtgtcgccgtcacgaatttcacctaccatgatgatgtcagggtcctggcgtaaaagcgcgcgcagcacattttgaaaggtgagcccggcgcggggatggatctgcgtctggttaatcccatccagtggaatttctatcggatcctcaacgctacagaggttgatacccggcgtattccgggtttgtagcgcgctgtatagcgtgaccgtttttccgctaccggtggggccagtcaccagtaccagcccctgaggttgctgtagggcttgtctaaaagcggtaagttgtgccccgtacatgcccagcgtgtccagatccagcgtttgttcaacctgatgcaacaaccgtaagacgactttttcgccttctttacagggaagcgtggcgatacgaaaagagatgctgtcgcccgccaggtcaacggtaaattgcccgtcctgcggcagtcgatgttcagcgatgtccaaatttcccaggactttcaatctggccgtcagcgcaagccccgtctctttggcgatgtcctgcagaatatgaagaacgccgtcgatgcggagtcttattcggtagcggctggcgccgggttcgagatggatatcagaggcgcgtttcgccatcgccgagcgtaatgtctgattgagaagctgggctgcggtttctccgcctttcgcggcgtttgccgagggtgcctgatccggcttatgccgatgattttccatttgctggcgagtccagcacacaatatcaatctgtttttgcgtggcgaaatgcagagcgtccagtaacgcatgagagggcgcgtcgaccaccgcaacagtgatactgttgctggcgctattgatcagtacagcctgatgacgttgacacaaggtgttgagctgagcgtctttcatcttgtctccttagttggcgtcaaaacggaagacatcttcacaagcctgttgtaacgcgctgtcgctttgaatattgcagttacgcgtccagccagtaatgccgttagcattgtcccaggcgggcgtcatgatgacgctaagcccgctcagactctcctggccggtaagcgtgatgacgcctttttccacgctcatgcccgaaacataacgggtgatgacgggcgaggggataccgttgacgcccgcatcgcatgtgctcgtcccaccatgttccagagcgcagagttcgacggcagtacggtaggggacaaacgtttgcaacatatccgtcagcgccgctttacgcagatagttctggtaagccggaatgccaatggcgcttaaaatggcgatgatgccaataacgaccatcagttcgataagcgtgaaaccgcgttgtttttccattgttcgctccttgagttagctggcgctactgtggcaaacgcgggaagagcgggcgagcggcaaaaggtaaaacgggaaggcggattctgaagattttcgctgcgttacatgacacggcaacgttattgcgaggcgctacgaatattttaccgaataatgacgcggatctacggacaggtgatttatagacccgacggcgcagcgccatcgggtggagaggatcagcaaaaacgcatggagagatcgagcgcgcgcacgtgcttggtcagcgcgccaacggagatgaaatccaccccggtttcagcaaattcgcgtaaggtttccgcggtgacgttgccggatacttccagccgcgcctggccgttgacgcgtttcaccgcctcgcgcatctggtcggtgttgaaattatccagcatgataatatccgcgcctgctttcagcgcatcgtccagttcatccagattttcgacctcgacttctaccggcacgtccggatgtagccagaacgctttttccaccgcctgacgaaccgaaccggaggcgataatatggttttctttaatcaggaacgcgtcagtgaggcccagacgatgattggcgccgccgccgcataaaaccgcatatttgagcgcggtgcgcagacccggcagcgttttacgcgtgtcgagcaactgggtttgggtgccagccaacagtccaacgtagcggcgtacttcactggcgacgccggaaagggtctggacaaagtttagcgccgtgcgctcgccggtcagcaatacgcgagccgggccgttcagttcaaacactgtttggttggcgtgaatggcgtcgccgtcatcgacatgccaggtgaggcgcacatcatcgcccgccagttggatgaagacctcttcaacccagcgcttgccgcagaaaacgccgtcttcacgagtgatcaccgtggcatgggcttgcgtatctgccggcaaaagttgcgcggtgatatcgttgccagcatcgacttctccacctaaatcttcacgcagcgcctgagcaacggcggcagggatatcgagattaatgcgttccagtagcgcgtcacgtcggtcgtctgggttataacggcgaggcggcatgataaaactccaaattgctaacgaatcataaggtagaaacatgctactctgaagcagctataagcaccactcaaaaggagactccgcatgttgccagataagggttggttggtagaggcgcgacgcgtcccttctccgcattatgattgccgtccggatgacgaaaaaccgtccttgctggtggtgcataatattagcctgccccccggcgagtttggcggtccgtggatcgatgcattattcaccggaacgatagatccagacgcccatcctttttttgcagaaatcgctcatcttcgtgtttcggcccattgtctgattcgtcgcgacggtgaaatcgtccagtatgtgccttttgataagcgtgcgtggcatgcgggcgtgtcaaactatcaggggcgggaacgttgtaatgatttctccattggtattgagctggaggggacggatacgctggcttataccgatgcgcagtatcagcagctagccgccgtgacgcgcacgcttatcgctagctatccggcgatcgccgacaatatgaccggacactgcaacattgcgcctgaccgcaaaacggaccctggccctgcctttgactggccgcgctttcgcgctttggtagccctctcgtcgcacaaggagatgacatgacgctgtttacgacattactggtgctgattgtcgagcgcctgtttaagctgggcgagcactggcagctcgatcatcggctggaggcgctattccgtcggattacgcatttttcgatgttgcgcacgatgggaatgacggcgatcgcgatggtggtgacttttctactgctccaggcgttaaaagggctgctatttaacgtgccgacgctggtggtgtggattctcctgggcgtgctgtgtatcggcgcgggcaaagtgcgagtacattatcacgcctggctgaaagcggcgtcccgtaacgatccgcatccttgcgaggcgatggccagcgagcttacgctgattcacggcgtgccgccggattgtaatgagcgtgaatttttgcgtgagctgcaaaatgcgttgttatggataaatttccgtttttacctcgcaccgctattttggtttatcgttggcggtccgtgggggccggtaacgctggtgggctatgcgtttttacgggcctggcagacctggctggcgcgctatcagacgccgcaccaacgtttgcaatccggcattgacgctattcttcatgtgctggactggattccggtacgtctggcgggcgtagtgtatgcattactggggcatggcgagaaagcgttgccggcctggtttgcctcgctggcggatctgcatacttcgcaatatcaggtgctcacacgtctggcgcagttctcactggcgcgcgaaccgcatactgacaaagtagaaacccccaaagcggcggtgtcgatggcgaagaaggcctcgtttgtggtggtggtgattattgcgttgctcaccatttatggggcattagtgtagcgttgtgccgatggcgctaacgcttatgctgcctacaatggaaaaatctgtaggcccggtaagcgttagcgccaccgggcagtgcaacggcttagatcgtatcggctggcggcacgccaaaatcaggcatcccgttttcgtcccagcgcacccgtttcagacgcgtatggcggttgggatcgtacaacggatcgccttcaatttcggtgtaatttctcgcgtggtacaccagtacattttcaccttccggcgtttgcgtaaagctgttgtgtcccggtccatactggcgattctcatagctggtggtaaagaccgggcgcggtgatttatgccagttggccggatcgcgcggatcgtcgtttacgttaatccacagtaatcccatacagtagttttcatcggtggcgctggccgaatagctgataaacagcttgtcgccatgcaccacgacggccggaccttcgttaacccaaaaaccccgacactcccagtcgtactctggcttactgagtcttaccggctcgcctttaatcgtccacggattttccagttcagccagataaatatttgagttaccggcaatatccggcgctttttgcgcccacagataccactgctttccctgatgataaaaagtggtggcatcgagggcgaaggtatcaaacggtgttttaatttgacctttctccgtccacttgccggtgagtgggtcggcatcggcgcactccagggcaaacatgcgatgctggaacattcccagcttatcaagcgcttgagtatgggtagcggcaaaatagatgtaccacttgccgttgatgcggtgcatttccggtgcccagatgagctggctcatcgggccgctttccggtttacgccagacgacaacggggtcggcggcgcgcaacccttccagcgaattagcccggcggatttccagcctgtcatattccggtacggaggcaataaagtagtaatcgctgccgtcgcgtaaaataaacggatcggcacgttgttcaataaacgggtttggccagtttgccatcaggctttccttacgctttcagcggcgttgagctcctgcaactcactcaattcgcggtaattagtgcgacgtttttccaaatcgtcctggatttttttcatcagttcacggtcaactttcagcagacgtaccacgcctgcggtaatcagatagccaacgccggggataacggtaaacaacagcataataccgttcatcgccgaggcgctttgcgctttggcgctggcgtcataaccgtaccaggagagcaaaaagccgaccatcgccccggcaatcgccaggcccagtttcaggaagaacaggttaccggagaagctgataccggtaatgcgtttgccggttttccattcgccgtaatcatcgacgtccgccatcagcgaccagtgcagcggggaagggatctgatgcagaatattgagcaggaagtagagcgccactatcatcacggtggctttcggatcaaagaaatagaacgcgcaggagaaaatcgccagcgcaatattggtccagaaaaataccttcaatttacaccagcgatcggttaagacttttgccagcatactgccgatcatcataccgaccacgccaagactaataaaaagcgtagcgaaatgggtgctttgtcccatcacccaggtgacgtaatacatggtcgccgccatacggataaaccccgggcagacgttacataaggtcaatagcagaatgcgtacccattgatcgtttttccacacatctttgaaatcattcttcatatcatcgtgcgtcggaacggcagggcggacgcgttcgcggacgctggcaaagcagaacagaaacatacccatgccgataatcgccagcacggtcatcgccaactgatagcctttggctttgtcgccgccgccaaaccagtccaccatcggcaatagcgttaacgatagcaacagcgtcgcgatgccgactaatacgaagcgataagcctgacaggccacgcgctcttttggatcgttagtgatcacgccgcccagtgagcaatagggaatattgatggcggtgtaggtcacggaaagcagaaaataggtgacgaaagcatagacaactttgctgttatagccccagtccggcgtcgtgaacatcagaacgctgaacagcgcgtagggaaatgcaatccacagtagccaggggcggaaacgaccatatttactttgggtacgatcggcaagcgcgcccatcaccggatcggtaacggcatcgataacgcgtactgaaaggagtaaaacaccgactaacgccggggcaagaccaaaaatatccgtataaaagtaattaacaaacagcatgatagcgccaaaaataatgttacatccggcgtcacccatgccatacccgattttctctcttaccgaaagtctgcccttatccattgagacttctccccatcagatgatggcggtaattattcgcctgcgagcttttttttgcgtagcaggatcacgccgctgatatggataaaatggttatacgtgggaaactgtgaggcagataacaccctccccggacggggagggcggaaaagtaacgccacgatcagtgggctttcaccgtttttgccgttttttctttacacaggtagccgacgcccaggatgagcagccataccggaatcagccacacggagatcgccatacctggcgtcatcagcataatgatcaataccgccgccataaacagcaggcagagaacattgccgaacggataaaacagggccgggaagcgggttttcacgccctgctgctgtttcgcgcgacggaacatcatatgggcaaggctaatcatcgcccagttaatgaccagcgcggagaccaccagcgccatcagcagtccgaatgcggactctggggccaggtagttgagcagcacgcacaacgcagtcacgacggcggaaaccaaaatggagctcaccggcacgccgcgtttgtcgacgttcagcagcgctttcggcgcatttccctgctgggccagaccgaacagcatacggctgttgcagtaaacgcagctgttataaaccgatagcgcggcggtgagaaccacgatattcagcgcattggcgacaaacgtatcgcccagctcatggaagataaggacaaatgggctggtatcggcggtgacgcgagtccatggcagcagcgaaagcagaaccgccagcgagccgatataaaaaatcaggatgcgatagataacctgattagtggctttggggatgctctgttccgggttatcggcttcagcggcggtgatccctaccagctccagtccgccgaacgaaaacataataatggccatcatcatcaccagcccggtccagccatgcggcagaaagccgccctgttcccacaggttgcgcacggtggcctgcggaccagcggtatcgctgaagagtaaccacgcgccgaacagaatcatagcgatgacggcgatcactttaataatggcgaaccaaaactccatctcaccgaacactttaacgttggtcaggttgatggcgttgataatcacaaagaaggctgccgcagaagcccaggtggggatctccggataccagaactggatatatttacccactgcggtcagttccgccatggcaactaatacgtacagcacccagtagttccagccggaagcgaatccggcaaagccgccccagtatttataggcgaagtggctaaaagagccggcgaccggttcttcaaccaccatctcccccagctggcgcataatcagaaaggcaataaagcctgcaatcgcatagcccaggataattcctggccccgccgactgaataacggaggcgcttcccaggaacaagcctgtccctatcgcgccgcccaatgcgataagctgaatatggcggtttttcaggccgcgcttgagctgctcgccgtgctgctgactgtccatcataaaacctcgtgtatcgggcgcggtttattcataacgcgcttattttgaacgatgcagtagtgcgtgtgtaagtttgcaattccgctttttgtattgatttatttacaagctcgttttttaaaatgtcacttcaactctttcgtcttgatcagaataatggtatgtggccgcgaatgcacctgctttgtgcaggggtgatgacgagttgcgtaaaaagaaagcacttgtaaatacctccttttattttcccttacagatgttaatttgtttttattcattatttatgcataaaaatgcatttaatctactgttgaatcggttcagatgagattttttatcgtttcaaatacgttaaatctacctcctggtgggtaaatttaacatttgtgcacagttacagttttgaaacatgatttctgtaaaattgttaaaatgtgcctcctttactgatttcaatcaaaacctgtatggacagaaggtgaatactttgttactttagcgtcacagacatgaaattggtaagaccaattgactccgggcaaatggcttaagacaggaaatcatggcctacagcaaaatccgccaaccaaaactctccgatgtgatcgagcagcagctggagtttttaatccttgagggaacattgcgtcccggagaaaaactcccaccggaacgtgaactggcaaaacagttcgacgtctcccgtccctccttgcgcgaggcgattcaacgtctcgaagcgaagggattgttgcttcgtcgtcagggcggcggaaccttcgtgcagagcagcctgtggcagagctttagcgacccgctggtggaactgctctccgatcaccctgaatcccagtttgacctgctcgaaacgcgccatgcgctggaaggcattgcggcttattacgcggcgctgcgcagcaccgacgaagataaagaccgtattcgcgagctgcaccatgctattgagctggcgcaagagtccggcgatctggatgccgagtccgaagccgtgctccagtatcaaatcgccgtcaccgaagcggcgcacaacgtggtattgcttcatctgctaaggtgtatggagccgatgctggcgcaaaacgtgcggcagaacttcgaattgctgtatgcgcgtcgggagatgctgccgctggtgagtacgcatcgcacccgtatatttgaagccattatggccggaaaaccagaagaagcgcgtgaagcgtcacaccgacatctggcgtttatcgaagagattatgctggacagaagccgtgaggagagccgtcgtgaacgcgctttacgccgcctggaacagcgcaagaattagttttttctggcagaacgttaaccagaagatgttgtgaataacgcgcaaaaatgtgcgcggcaactaaacgcagaacctgtcttattaagctttctcacgaaagtttaatgggacaggttccagataactcaacgtattagatagataaggaatacccccatgtcagaacgtttccaaaatgacgtggatccgatcgaaactcgcgactggctacaggcgatcgaatcggtcatccgtgaagaaggtgttgagcgcgctcagtatctgattgaccaactgctttctgaagctcgtaaaggcggcgtgaaagtcgcggcaggcgcaggggccagtaattacatcaacactattgccgttgaagacgaaccggaatacccgggtaatctggagctggaacgtcgcattcgttctgcgatccgctggaacgccatcatgaccgtgctgcgcgcgtctaaaaaagaccttgagttgggcggccacatggcgtccttccagtcttccgccacgatctatgatgtctgttttaaccatttcttccgtgcgcgcaacgaacaggatggcggcgacctggtgtacttccagggccacatctctccgggcatctacgctcgcgcgttcctggaaggtcgtctgacccaggaacagatggataacttccgtcaggaagttcacggcaatggcctctcttcctatccgcacccgaaactgatgccggaattctggcagttcccgaccgtctctatgggtctgggcccaatcggtgctatctaccaggcgaaattcctgaaatatctggaacaccgcggcctgaaagatacctctaaacaaaccgtttacgccttcctcggcgacggcgagatggatgagccggaatccaaaggcgcgatcaccatcgccacccgtgaaaaactggacaacctggtctttgttatcaactgtaacctgcagcgtcttgacggcccggtcaccggtaacggcaagattgttaacgaactggaaggcatctttgcaggtgctggctggaacgttatcaaagtcatgtggggcggtcgttgggatgaactgctgcgtaaagacaccagcggtaagcttatccagctgatgaacgaaaccgttgacggcgactaccagaccttcaaatccaaagacggcgcttacgtgcgtgagcacttcttcggtaaatacccggaaaccgcagccctggtggccgactggaccgatgagcagatttgggcgctgaaccgcggtggtcacgatccgaagaaagtctatgctgcactgaaaaaagcgcaggaaaccaaaggcaaagcgaccgtaatcctggcccataccattaaaggttacggcatgggcgacaccgcggaaggcaaaaacatcgctcaccaggtgaagaaaatgaacatggacggcgtgcgttacgtccgcgatcgtttcaacgtgccggttgccgatgctgatctcgaaaaactgccgtacattaccttcccggaaggttctgaagaacacaaatacctgcatgaacgccgtcaggcgctgcatggctacctgccaagccgtcagccgaacttcaccgagaagttagagctgcctcaactttcagatttcggcgcgctgctggaagagcaaagtaaagagatttccactacgatcgctttcgtgcgtgccctgaacgtgatgctgaagaacaagtcgatcaaagatcgtctggttccgatcatcgccgacgaagcgcgtactttcggtatggaaggtctgttccgtcagattggtatctacagcccgaacggccagcagtacaccccgcaggaccgtgagcaggttgcttactacaaagaagacgagaaaggccagattctgcaggaaggtatcaacgagctgggcgcaggcgcatcctggctggctgcggcgacctcttacagcaccaacgatctgccgatgatcccgttctacatctactactctatgttcgggttccagcgtatcggcgacctgtgctggcaggctggcgaccagcaggctcgcggcttcctgatcggcgggacttccggtcgtactacgctgaacggcgaaggtctgcagcacgaagatggtcacagccacattcagtcgctgactatcccgaactgtatctcttacgacccggcttacgcttacgaagtggctgtcatcatgcatgatggtctggagcgtatgtacggtgagaaacaagagaacgtttactactacatcaccacgctgaacgaaaactaccacatgccggccatgccagcaggtgccgaggaaggtatccgtaaaggtatctacaaactcgaaaccctcgaaggtagcaaaggtaaagttcagctgctgggctccggttctatcctgcgtcacgtgcgtgaagcagcacagatcctggcgaaagattacggcgtaggttctgacgtatatagcgtgacctccttcaccgaactggcgcgtgatggtcaggattgtgaacgctggaacatgctgcacccgctggaaaccccgcgcgttccgtacatcgctcaggtgatgaacgacgctccggctgtagcatctactgactatatgaaactgttcgccgagcaggttcgtacttacgtaccggctgacgactatcgcgtactgggtacggatggcttcggccgttccgacagccgtgagaacctgcgtcaccacttcgaagttgatgcttcttatgtggttgttgcagcgctgggcgaactggctaaacgtggcgaaatcgacaagaaagtggtagcggatgcgattaccaaattcaacatcgatgcagataaagttaacccgcgtctggcgtaagaggtaaaagaataatggctatcgaaatcaaagtaccggacatcgggacagatgaagttgaaatcaccgagattctggtcaaagtgggcgacaaagtggaagctgaacagtcgctgatcaccgtagaaggcgacaaagcctctatggaagtcccgtctccgcaggctggcgtcgtgaaagagatcaaagtctctgtcggcgacaaaaccgagaccggtgcacttatcatgattttcgattccgccgaaggtgcagccgacgctgcacctgctaaggcagaagagaagaaagaagcggcgccggcagcagcacctgctgcggcagcggcgaaagacgttcacgttccggatatcggcagtgacgaagttgaagtgactgaagtgatggtgaaagtgggcgacaccgtagaagctgaacagtcgctgatcaccgtcgaaggcgacaaggcctctatggaagttcctgctccgtttgcaggcaccgtgaaagagatcaaagtgaacaccggtgataaagtctctaccggctctctgattatggtcttcgaagtggcgggtgaagcaggcgcagcagcaccagcgaaagcggaagccgctccggctgcggctgctccagcagcagcgacgggcgtgaaagacgttaacgtaccggacatcggcggcgacgaagttgaagtcaccgaagtgatggtcaaagtcggcgataaagttaccgctgaacagtcgctgatcaccgtagaaggcgacaaagcctctatggaagttccggctccgttcgcgggtaccgtgaaagaaatcaagatcagcaccggcgataaagtgaaaaccggttctctgattatggtcttcgaagtagaaggcgcagcgcctgcggccgctccggctaaacaggaagcggcggcgccggctccggcggcgaaagctgagaagcctgctgccccggctgcaaaagcggaaggcaaatctgagttcgctgaaaacgacgcgtacgttcacgctactccgctgattcgccgtctggcgcgcgagtttggcgtcaacctggcgaaagtgaaaggcaccggtcgtaaaggccgtattctgcgcgaagacgttcaggcttacgtgaaagacgctatcaaacgcgcggaagctgcgccggctgctgcgggcggcggtatcccgggtatgctgccgtggccgaaagtggacttcagcaagtttggtgaagttgaagaagtggaactgggccgtatccagaaaatctctggcgcgaacctgagccgtaactgggtgatgatcccgcacgttacgcacttcgacaaaaccgatatcaccgatctggaagcgttccgtaaacagcagaacgccgaagctgagaagcgcaaactggatgtgaaatacacgccagtggtcttcatcatgaaagcggttgccgctgctctggaacagatgccgcgcttcaacagctctctgtccgaagacggtcagcgtctgaccctgaagaaatacatcaacatcggcgtggcggttgataccccgaatggcctggtggttccggtctttaaagacgtgaataagaagagcgtgaccgagctgtctcgtgaactgaccaccatctccaaaaaagcgcgtgatggtaagctgaccgctggcgaaatgcagggtggttgcttcactatctccagcatcggcggcctgggaactacccacttcgcgccgattgttaacgcgccggaagtggctatcctcggcgtttctaagtcggcgatggaaccggtgtggaatgggaaagagtttgtgccgcgtctgatgatgcctatctctctttccttcgaccaccgtgtgatcgatggtgctgatggtgcgcgtttcattaccattatcaacaatatgttgtctgacattcgccgtctggtgatgtaagcgaaaagccggcccgacggccggctttttttgataatctcatggagtttgtgaggttattagcgaaagcgataattcgtgatccgtttgttgtttcaaaattgttaacaattttgtaagatacgggcggatagaacgacccggtggatgatgggcgatcaagtaccccggaccgccggatacaaataaagaggtcatgatgagtactgaaatcaaaactcaggtcgtggtacttggggcgggcccggcaggctattctgccgctttccgttgcgctgatttaggtctggaaaccgtaattgtagaacgctacaacacccttggcggtgtttgtctgaacgtcggctgtatcccttctaaagcgctgctgcacgtagcaaaagttatcgaagaagccaaagcgctggctgaacacggtatcgtcttcggtgagccgaaaaccgatatcgacaagattcgtacctggaaagagaaagtgatcacgcagctgaccggcggtctggcgggtatggccaaaggccgtaaagtgaaagtggtcaacggtctgggtaaattcaccggggcgaacaccctggaagtggaaggcgaaaacggcaaaaccgtgatcaacttcgacaacgcgatcatcgcggcaggttctcgtccgatccaattaccgtttattccgcatgaagacccgcgcgtatgggattctaccgacgctctggaactgaaagaagtgccgaagcgtatgctggtcatgggcggcggtatcatcggtctggaaatgggtaccgtataccacgcgctgggttcagagattgacgtggttgaaatgttcgaccaggttatcccggcggctgataaagacatcgttaaagtcttcaccaagcgcatcagcaagaaattcaacctgatgctggaaaccaaagtgactgccgttgaagcgaaagaagacggtatctacgtttcgatggaaggcaaaaaagccccggctgaagcgcagcgttatgatgcggttctggtggcgattggtcgtgtgccgaacggtaaaaacctcgacgcgggcaaagctggcgtggaagttgacgaccgtggctttatccgcgtggacaaacagctgcgcaccaacgtgccgcacatcttcgctatcggcgatatcgtcggtcagccgatgctggcgcataaaggcgttcacgaaggccacgttgccgctgaagttatcgccgggaagaaacactacttcgatccgaaagttatcccgtctatcgcgtacaccgagccagaagtggcatgggttggcctgaccgagaaagaagcgaaagaaaaaggcatcagctatgaaaccgccaccttcccgtgggcagcttctggccgtgctatcgcttctgactgtgcagacggtatgaccaaactgattttcgacaaagaatctcaccgcgtgatcggcggggcgattgtcggtaccaacggcggcgagctgctgggtgaaatcggtctggcgatcgaaatgggctgtgacgcggaagacatcgcgctgaccattcatgcgcacccgactctgcacgagtccgtcggtctggctgctgaagtgttcgaaggtagtattaccgacctgccgaacccgaaagcgaagaagaaataatcttctgtaggtggcaatgcgccacccgatacaaaaaagcggctttacagccgctttttttatgcatggcaaatcagatgtgtcaaatgatggcgaaggataacgaaaccgcaaaatttatcgtttccgcagcagtacgtttttcaaagcttatgccgtcggtagtgcctttgtctgtcattttcgaccaactaattgtttcataagaaatacctctccttactttgtcatcatcctgaaattggtaacgctataaaataatagcgagctaattatgaggtttgatatatgaaactttttctgacaacagcagcgctaactgcgaccttgatttccggcatggcatttgccagcgatcccgtcatcccctgggcgactaacagcggcggtacggaaagcacgcatattgcggcaatgggcgaggatttgaatgcgcagcatcagcagatcacccacacgcatgaaggcgtatgggcggctaattccggcagcattcaggctgatgaagctgcgctgaccagcaacaagccgccggtacaaggccatccggaattaatgccgcatcagggctaatgatcatggcctggcgataacgccaggcgcttacgggttattcggcgacctgccactgtgcgtctggcgcaaaacgcgtgatagcctgaactttactctccgtctccttgcctaaatccgcctgataaatacgatcgtcctggttgaccataaaactcatcaccccggtttcgccgtaatgcatcggccaggccagaagcgccgcgccgtgaccgtcgttatcgctgataatacggaaatggtagccgtggtaaccctcgtctggcgctgcgggactaaagtttgggcctaacggactggggacgtcgcctgctttggttggccagtacaggccatctttttggccttcgctactgattatcctgtgcgcccagcgatggttttgtaagtaataatcctgctgcgcatcaacgtaagcatgcatggcctgtaaggtagaaagttcatttcgcccaatagtacgggtgaggatctcattcccggctgccgccatatcaaagcgccagccgccagtctctttcaccatgggcaccgggagctgccagtcttctcgtccgacattcaggtgcgccgtattgtctttttgtacaatgcgatggccttcgcgccagtcacgattgaagcgggccacggcctcgggatcggcaccttccggcggcagaaattgccgccagtcatcgcccagtagcgcggtaagctgcgtttcgttttttccggctaccgccgcggcgaaggcgctggcggccgcttccggggaggggaaccgttcctgcgcgtagcccagcaagggtaacgacagtaacagagcgcttaacataacctttttcattatctgctccggttaacggcgatgaaattcatgatgttcagaaaaatgttcccgcgcggcggcgcgttgctcggtgtttaagtgactgccgcgacggctttccaggccgcgtagctgttgcgattgccatgacggcgatcgactgtcgttcccgctaaacacattggcgtgcatattctggcgaaatgcctgacgctgctgcggcgtagaggattcaatacgctggcgggcggtgtctctctgctgttgtgaaacagggtgctgctgggctttagccttcagctcggaacgatgctgctgcgtggtggatttattcagtgtctgctgcgccgcctcgcgacgactgctgttttgtgttccgtcatagccacggtaattattacgctgggcaatttgatttaactgctgcgatgccgccttacgctgggcatcgcgggtgcctggcgctggcaaagaagcgttggccgtatggctgcgctgttgaaattgcgtcatggccgcctggcgctgactgtcgcgagacactggcgcttgctgcgttgcgcttaacccgccgctaacattggtgggatggaaccgttgcgcaacggtattattcgaataggggacgccattgcgccaggcgggattatgctgccagcccatcgtttggcccggcaggttttgcccggatatccggttgaaattattgacattgatgttgatattatcgccattatgttgataaccgttaccaccatgatggtaatcatcatcatggtggtcgtcgtcatggtgggtcatcatcccagtctatgctgctgaacaacgcataggtggtggcgacgcccagactataaccaaaacctttaacaaaactgtcggcaaactgctgccccggagggggcggtaaatacaccggcggataagcggtattgggccaggcgccatacaccgtcgcggggttatagttcggcacgtacaccacctgcggattcgcgggttcaatttttataacggtcgacggtgtcgctggcgtactggcggatgtggtggttgtcgtcgtgacggcggtagaagcgctggacttcggcacgctggtgacggtttgctgtggcgtggattttagcgaaccggtttgttgagcgagcagacgcagcctttgcaccgcatccatcacatcctgtggctgggctaagaacgcatcgcccaggttttgcacccattgcggattctcgcccataagcgccatcaactggggaaaggcgaccagcgatttgacgctggggtcccacggttggctggccaccgcctgaatagcggcatcgccctgcagcgtagggttatcgcgcgaccactggacggcctgaactacgttcgccgggtaggtggaggccatgagcacctgcgaaagcagggcatcgggataaagcgcgacaggcgcgacccattgatcaatttgcgcagtggtaaaggtcgttttcgcgacaggcgcgggcacagcggtctgcgttggctcagaggcgggagctgccgcctgcgcgggcgcttcgggagcgcggcttttaacatacagtacgcccgaagcggcaaataacccggcactgcacacaagggcaatgagatggggtttaaagggcaacgtcattttatctctcccgattccagagaatcgctatggtcattatgcctgccgccgacggggtgcagtttggcgtgagtataaagggacgatagtttaatttttagctaatgttgggatcggtaacgttacgtgacgatcaaagcacgaaatgaggtaagcatttatggctgcagctcccgtctcagtagagcattagaccatccttaacgattcagccacttttttatgttgcttttttgtaaacagattaacacttaaagaaaatcctgttattgtgccttatgcggtaccgggcatttaccctactaactactgtctcacaggagcgtgaagagaatcgcccatcaacaaaagcgccgcattatgacaatgagagcgaggagatatcgtcgtgctagaagaataccgtaagcacgtagctgagcgtgctgcccaggggattgtgccaaaacctttagacgcaacccaaatggctgcgcttgtcgagctgctgaagaccccgcctgtgggcgaagaagaattcctgttagacctgttgatcaaccgcgttcctcctggcgtagatgaagccgcttatgttaaagccggttttctcgctgctgtcgcgaaaggcgacaccacctccccgctggtctccccagaaaaagccattgaactgctgggcaccatgcagggtggttacaacattcatccgctgattgatgcgctggacgatgcgaaactggcgccgattgctgccaaagcactgtcccacaccctgctgatgttcgataacttctacgacgtagaagagaaagccaaagcgggcaatgaatatgccaaacaggtgatgcaatcctgggccgacgccgaatggttcctgagccgtccgccgctggcggaaaaaatcaccgtcaccgttttcaaagtgaccggcgaaacgaataccgacgatctctctccggcgccggatgcgtggtcgagaccggatatcccgttacatgcgcaggcgatgctgaaaaacgcccgtgaaggcattgagccggatcagccaggcgttgtcggcccgatcaaacaaatcgaagcattgcagaaaaaaggctacccgctggcttacgtgggtgacgtggtgggcaccggttcttcccgtaaatccgcgaccaactccgtgctgtggttcatgggcgatgacatcccgaacgtgccgaataagcgcggcggcggtctgtgcctcggcggcaaaattgcgcctatcttctttaacactatggaagatgcgggcgcgctgccgattgaagttgacgtttctaacctgaatatgggcgatgtgattgacgtctacccgtacaaaggcgaagtacgcaatcatgaaaccggcgagctactggcaaccttcgaactgaaaaccgacgtgctgattgacgaagtgcgtgccggtggtcgtattccgctgattatcggccgtggcctgaccaccaaagcgcgtgaagcgctggggctgccgcactcagacgttttccgtcaggcaaaagacgtggcggaaagcagccgtggcttctcgctggcacagaaaatggtcggtcgcgcctgtggtgtgaaaggtatccgtccgggcgcgtactgcgaaccgaaaatgacctccgtcggttctcaggatactaccggcccgatgacccgcgacgagctgaaagacctggcctgtctgggattctccgccgatctggtcatgcagtcgttctgtcacaccgcagcctatccgaagccggttgacgtcaccacgcaccacacgctgccagacttcattatgaaccgtggcggtgtctctctgcgtccgggcgacggcgtgattcactcctggctgaaccgtatgctgctgccggataccgtcggtaccggcggtgactcccatacccgtttcccgattggtatctctttcccggcgggttctggtctggtggcgtttgccgccgcgaccggcgtgatgccgctggatatgccggaatccgtgctggtgcgcttcaaaggcaaaatgcagccgggcatcaccctgcgcgatctggtacacgccatcccgctgtacgccatcaaacagggcctgctgaccgttgagaagaaaggcaagaaaaacatcttctctggccgcatcctggaaatcgaaggtctgccggatctgaaagtcgagcaggcgtttgagctgaccgatgcttccgccgagcgttccgctgccggttgtaccatcaagctgaacaaagagccgattgttgaatacctgacctccaacatcgtcctgctgaagtggatgatcgccgaaggctacggcgaccgccgtacgctggaacgtcgtatccagggcatggaaaaatggctggcggacccgcagctgctggaagccgatgctgacgcagagtacgcggcggtgatcgacatcgatctggcggatatcaaagagccaatcctctgtgcgccgaacgatccggacgacgcgcgtctgctgtctgacgtgcagggcgagaagatcgacgaagtgttcatcggctcctgcatgactaacatcggccacttccgtgcagccggcaagctgctggacaaccataaaggccaactgccgactcgcctgtgggtggcgccgccaacccgtatggacgccgcgcagctgaccgaagaaggttactacagcgtgttcggtaagagcggtgcgcgtattgagatccctggctgttccctgtgtatgggtaaccaggcgcgtgtggctgacggtgcgacggtggtttccacttctacccgtaacttcccgaaccgtttaggtaccggtgcgaacgtcttcctggcttctgcggagctggcggcggttgcggcgctgatcggcaaactgccgacgccggaagagtaccagacctacgtggcacaggtggataagacggcggtggatacttaccgttacctgaactttgaccagctttctcagtacaccgagaaagcagatggcgtgattttccagactgcggtttaatttacattttaagggggctaattgccccctttttattcatattatatgtttctgtattttctatctttttaagatgttgcgtatttttattttagcttcttcatattgtaggttttcctctcttaagtatatatgaacagctttgtgacaatttgggcaaagtaatgcaaagtcagttttcaatattctgtgctcaccggtaaaagtatgtattggtattttgtggtgggcctcaatatagtttttaccatatttatctaagaatttaatctcacaaatatcacaaacccattgcgagttatcttttatttcatctattatttttctattccgctcagataacatatgagttatgtatttaatttttccttcagtgtgctcgtttttatacaaaatgacgtcatcattgtcactattcttatcatttagacttgggaaacttatcattttttctaagatgactgctttttctagtatgtctatgattttaaagcatccctgaaattcccatttgttagatgaatcagtaaataacaaaattggatagttgcttatcggttggttaattagaacccggttcgcagaatcattaaagttaatgatgccttttgctgctttaaatgagtaagagtatatggttttttcattatttttccagccatcatcagcgtaagaaccatcctttgtttttattattactgctttgatattgggatgttctcctatccaatttattccttgttgaggtgtgtttttaattatccaatccttgccttcccaattttcactgtcatcttttttagatttttggatgagctgggataaattttgtttgttaattatatctgagatagttaatgaaagaagttgagatggatattgaataagctttaaggttcccattatattcctatactataaagtgtataataattatcattatacatgctagcagtgtaaatttactacattcataatgatagcatgggacgatgctacttgtggaaccagaatgcagataacccgatcttcttattgataaatttacgacaattagacgtatccactttttttcctctacatagctgcgataattacccataggtacaatgcagcggtgacgcattgcctttgtagaggaacagatcatggattacgaatttctgcgcgacgttaccggaggggtaaaagtacgaatgtcgatgggccacgaggtggtcggtcactggtttaatgaagaggttaaagacaacctctcgctactggatgaagtagaacaagccgcgcgtacggtcaaaggcagcgaacgctcctggcaacgagcagggcatgaatacacgatctggatggacggcgaagaagtgatgattcgcgccaatcaactggatttttccggcgatgagatggaagaggggatgagttattacgatgaagagagtttatccctgtgcggcatggaggattttctgcgggtcgtcgccgcgtatcgggaattcgtcagtaaagcctgaccctctcttcgttattgtcccacaacgccagtcgacggacagttgggggcggtagtggaaacgaagtcgccaaacattccagccgggagtatcccggcttttttatagcagaatgattttttgatttttattaatcattttaaaactgtgatctgacgcgtttgtgatcttaatttgattgaatataatcgttatgattttattcaatcacaacaagcaacaggcggtaagaccatgaacatcaaaaaagcaatagagcgcgtacccggcggcatgatggtcgtaccgctcgttattggcgcagtcattaacaccttcgccccgcaggcgcttgagatcggcggttttaccactgccttatttaaaaacggcgcggcaccgctgattggcgcttttctgctgtgtatgggagccggtatcagtgtgaaagccgcgccccaggcgttattgcagggcgggacgattacgctcactaagttgcttgtcgccatcggcattggtctgggcgtggagcatcttttcggcgcggagggtatttttggcctgagcggcgtggcgattatcgcggcgatgagcaattcaaatggcggactttatgctgcgctggtaggcgaattcggcaatgagcgcgacgtcggcgctatctctattttgtctcttaatgatggccctttctttacgatgattgcgctgggcgcggcagggatggcgaacattcccattatggcgctggtggcggtgctggttccgctggttgtcggcatgatcctcggcaatcttgatcctcatatgcgcgattttttgaccaaaggcggcccgctgctcattcctttctttgcttttgcgctgggggcgggcatcaatctggaaatgttactgcaaggcggacttgccggaattctgctcagcgtgctgacaacgttcgttggcggtttctttaatattcgcgcagatcgtctggttggcggaactggcattgccggggcggcggcctccagcaccgcgggtaatgccgttgcgacgccgctggctattgcgcaggccgacccttcgctcgccgaggtggccgctgctgccgctccgctgattgccgcctcggtgatcaccacggcaatcctgacgccagtgttgacctcctgggttgcgaaaaaacaggcgcgtcaggcttctttggagaaaaacgcatgaaaatgatagttatcgccgatgattttaccggatcgaatgataccggcgtccagttggcgaagaagggggcgagaacggaagtcatgttgagcgcgtcgcaaaaaccgtcccgccgcgccgatgtgttagtcattaacaccgaaagccgggcgatgcccgcagatcaggcggcatctgccgtttatgccgcgctttcgccgtggtgtgagacatcgccagcgccgctggtgtacaaaaaaatcgactccacatttcgcggcaatatcggcgccgaagtgacggcggccatgcgcgccagtcagcgaaaactggccgttatcgccgccgcgatccctgcggccggacgcacgacgcttgaaggaaaatgtctggttaatggcgtcccgctactggaaaccgaatttgccagcgatccgaaaacgcccattgtctcttcccgtattgccgagatagtggcgttgcaaagtgagatccctgtgtatgaagtctttttgcaggatgtccgacgcggcgggttaagcgccttacttacggcttatgcggctgagggcgaagggattatcgtcgtggatgcggtggaagagcgggacctgacgttgattgcgcaagcggcgtgtgaacaaccgtcgatgccgctgctcgtcggcgcagcgggtctggcgaatgcgttgccggttgaactttttatgcaagaccggcagcggctgccggtgctggtggtggccggttcgatgagcgaagccacgcgacgtcaggtggataatgcgctgtgccggggacgtgcggaggtcgtggatatcgatgccgcgcgcatggtgtcggatagcgcggaacaggaaatcgcgtctgtcgtagagcaggcctgcgcgctgttaagtcagcatcgacatacgattttacgcaccagccgtcgcgcagaagatcgacagttaatcgacgcgttgtgcgaaaaatccgcgatgagccgtcagcaattgggcgagcgactgagccagcggcttggcgtcgtcacgttaaacattatcgagcaggcgcggattggcgggctgtttctgaccggcggcgatatcgctaccgccgtcgccggcgcgcttggcgctgaaggttatcgcattcagagcgaggtggcgccctgtattccctgtggaacgtttgtaaacagcgaaattgacgatctgccggtcattaccaaagcgggcggattcggttcagacagtacgttgtgtgacgcgctttattatattgaggagatgtattgtggagactaaaaccgttgccattaccatgggcgatccagcgggcattgggccggaaattattgttaaagcgctaagcgaagacggtctcaacggcgcgccgctggtggttattggatgcctcgcaacgttgaaacgtttacaggcgaagggcatcacgccgaacgtcgagttacgggccattgaacgggtcgccgaagcgcgttttgcgcccggcatcattcatgtgattgatgagccgctggcgcagccggaggcgctggaggccgggaaagttcaggcgcaggcgggggatttagcgtatcgctgcgtgaagcgcgccaccgagttagcgttacggggcgacgtacaggctatcgctaccgcgccgctgaataaagaggcgctgcacctggcggggcacaactatccgggccataccgagctgctcgcgaccctgacccatagccgcgattacgcgatggtactttacaccgataaactaaaagtgattcacgtttcaacgcatatcgcgctgcgtaaattccttgatacgttaagtaccgcgcgtgtcgaaacggtgattggcattgctgatactttcctcaagcgtgtgggttacgttaaaccgcgtatcgccgtggcaggcgtgaatcctcatgcgggcgagaatggcctgtttggcgatgaagagacgcgtatcctgacgccagccattaccgatgcccgcgcaaaaggtatggacgtttatgggccgtgcccgccggatactgtatttctccaggcttatgaggggcagtatgatatggtggtggcgatgtatcatgaccaggggcatatcccgttgaaattgcttggcttttatgatggcgtgaatatcaccgcggggctgccgtttattcggacctctgctgatcatggcaccgcatttgatatcgcctggacgggaaaagcaaaatctgagagcatggccgtatcgatcaaactggcaatgcaactggcataattccctgttatgaaaggacaacaccgtctggatctcattgtggcgtatctgaaaaaccatacgctggttacggtagaacagctggttgaggcggttgacgcatcgccagccactatccgtcgcgatttgatcaagctggatgagcagggcgtgatcagccgtagtcatggcggtgtggcgctgcgacgttttgaacccgcccagcccaccaccaatgaaaaacaactgcgatcgcccgctgaaaaacgggcgatcgcacgcgttgccgcatcgctggtcaatgctggcgatgccgtcgtgctggatgccggtacgacaatgatggaactggcgaaatgcttaacccatcttccgctgcgggtcatcaccgtcgatctgcatattgcgctgtttttagctgagttccggcaaattgaagtgacgattgtcggcggtcgtatcgatgacagcagtcagtcctgtatcggtgagcatgggcgcaagctgttgcgcagcgtttacccgaacatcgcgtttatgagctgtaattcatggggggtaaaaacgggcgtgacgaccccaacggaagataaggccgggcttaaacaggagattattgctaatgcgcagcgcaaagtgttgctggcggacagcagtaagtatggcgcgcattcgctctttaatgtggtgccgcttgagcgctttaatgacgtgattaccgacgtcaatctgccgccgtcagcgcaggttgaactgaaagggcgcgcttttgcgctaacgctggtgcagccggagtgacagcgccgtcaggcgctgccagtggtgaatcagaccgcagaaatattgcggccgtagtaaatctcgcgcatctctttccacagcgcggcggtgatctcctggcgttcggtttcagtgagatcttccggtttggtgtgaaacatgtagtgcttaagatcgaactctttaagcagcatcttggtatggaaaatattttcctgatacacgtttacatccaccatgtcatacagcgacttcatatcttccgacataaaattctgaatagaattaatctcatgatcgataaagtgcttcataccgttgacgtcgcgtgtaaagccgcgcacgcggtaatcgatggtgacgatatcggactctagctggtggatcaggtaattgagcgcttttagcggtgaaatcaccccgcaggttgacacttcgatgtcggcgcgaaaggtgcatagcccgccttccggatggctttccggataggtatgcacgcagatatggctcttatcgaggtgcgccaccacggtttccggcagcgggccgggatgttcggtttgatcgataagtttcgggtcgatcggctcttcgctcaccagaatcgtgacgctggcaccctggggttcataatcctgacgggcgatgttcaggatgtttgcgccgataatggagcaggtctccgacaggatctcggtcagtcggttggcgttatagagttcatcgatataggcgatatagccatcgcgctcttctgcggttttggcgtagcagatatcgtaaatacaaaaactcaggcttttcgtcagattgttaaagccatgcagtttcagctttttcaatttttatcacctccttaacgtcactgtgcggacagtgcgtcatgtagatattgcggtagcgcaaatgcagcggcatgaatagccgggttgtaatagcgacatttgaggccggcggcatgaaaacgtgcctgaataatttcgctcgacaggtggcgaagagcgtcgttgtccgtcgcccaggcgaaggtcataatgccgccgtaataggtcggaatcgccgcctggtagaagccgacatcgctgaagtaatgactcagcttgcggtggctgtcgagcgcttcatcctgctgcaggaagcacacgccgttctgggcgacaaaaatgccgcccggattcaggcaacgcttacagccttcataaaaggcggaggtaaacaggctttcgccggggcctatcggatcggtacagtcggaaatgatcacatcaaaggtctgatgggtttgattgacgaaattcacgccgtcgtcgattaccagcgtaaagcgcggatcgtcgtagctgccggcattgtggttgggtaaatactggcggcaaaacgagactacgccagcgtctatctctaccatggtgatggtttcgacgtttttatgccgggtaacttcacgtagcattgcgccgtcgccgccgccgataatcagaacgtgtttcgcatgaccgtgcgccagcagcgggacatgggtcatcatttcatgataaataaactcgtcgcgttcggtggtctgtaccacgccgtccagcgccatcacgcggccaaaagcggcgttttcaaagatgattaaatcctggtgatcggttttttcatgatacagaacgttgtctacggcaaagtactgaccaaactggtcgtgtagcgtttcatgccacatcgtattttcggccattggctgatacctccattgttaacacccgtaaaaaaagggcgcaacatcatagctaacaatgaccgtggatgcacggtcattatttcagcaataggatcacggaggattatttaacgtaggctaacaggctcagagaatcgcgggccagagctttgcattttttagcgaccggaataccgatgccgctaagatcgcggtagctgtcttcgcccaacgatttcatatcgaaggtgtcgtagttactcaggtcccactgattttgctgggcaaaaaagaccagcgcacggcgaatctggctgttgggtaaattttggtaaccacagtcatttttcagaaaaacgaaaactgccgttaaatcggccatatcttcagcttcggattcagtaagcgcatagctatttgcgcataaggccatcaggctgccaaacaacacgggtctgaaaaacgtcttcattgcttctaccacggcatcagggaaagtcaacgttagcatactgagaacgtagcgacgacttttattatcaggattggtcgcggcgttttcattcttattgtattgctgtcaggaatggtaaagacgtgttgctggcttgaccttcccgttagggcagggtctaagcttagacacccgcctgttcattataaggaaatgattatgttacgccgtgatttcttaaaatattcagtggcgctgggggttgcatcagcgctgccgctgtggagccgcgccgcttttgccgccgaacgtcccgcgttgcctattcctgacctgttaacggcagatgcgagcaaccgtatgcagttaattgttaaagccggacagtcgacattcgccggtaagaacgcgacaacctggggctacaacggtaatttgctggggccagcggtacagcttcacaaaggaaaaagcgtgaccgttgatatccataaccaactggccgaagacacgacgcttcactggcatggtctggagattccgggcatcgtcgacggcggcccgcaggggattattcccgcaggcggaacccgcacggtgacgtttacgccggagcaacgcgccgcgacctgctggattcatccgcacaaacacggcaaaaccgggcgccaggtggcgatgggccttgccgggctggtgctgattgaagatgacgagattcgcaaattgcgcctgccgaaacagtggggcatcgacgatgtgccggtgatcattcaggacaaacgcttctccgccgatggccagattgattatcaactggatattatgaccgccgccgtcggctggtttggcgatacgctgctgaccaatggcgctatctatccgcagcattccgcgccgaaaggctggctacgtctgcgcttgctaaatggctgtaatgcgcgctcgctgaatatcgccgccagcgataatcgcccgctttatgtgatcgccagcgacggcggcctgctggcggagccggtgaaagtcaccgaactgccgttattaatgggcgagcgttttgaagtgctggtggatatcagcgacgggaaagcctttgatctggtgaccctgccggtcagccagatgggaatggcgatcgctccgtttgataaaccgcatccggtgatgcgtatccagccgctgcggattaccgcctccggtacgctgccggatacgttgacgacgatgccggcgctgccgtcgctggaagggctgacggtgcgcaacctgaaactgtcgatggacccgcgccttgatatgatggggatgcaaatgctgatgaagaaatatggcgctcaggcgatgagcggcatggatcatgacagcatgaacgcgcatatgcagggcggcaatatggggcatggcgagatggatcatggcaacatggatcacagcgggatgaatcatggcgcgatgggcaatatgaatcacggcggaaaattcgacttccataacgctaactttatcaacggccaggtcttcgatatgaacaaaccgatgttcgcggcgcaaaaaggccgacatgaacgttgggtgatttccggcgtgggtgacatgatgctgcatcctttccatattcatggcacccagttccgtattttgtcagagaacggcaaagcgccagcggcgcacagaacgggctggaaggatacggtacgcgttgagggcggtatcagcgaagtgctggtcaagttcgatcacgacgcgccgaaggaacatgcctatatggcgcactgtcatctgttagaacatgaagatacgggaatgatgttaggatttacggtctgaccgatgtctgtgacgcaggccgggtaaggcgaagccgccacccggcacaatgcccggcatacgccgggcattaatggttatttcgcgtcgtcaggcaaagcataggccacgatatagtcgcccatcttcgtaccaaacgaaccgtggcctccggcagaaacgaccacgtactgcttaccgtttacctcataggtcataggcgttgcctggcctccggcgggtaaacgtccctgccacagtttttccccgttgctcatgttataagcgcgcaggtagttgtcggcggtcgcggcaatgaacagcacattaccggcggttgagattggcccgcccagcatgggcatccccatgttgaacggcaccggaaccggcatcgggaacggcatactgtcgcgcggcgtccctatacgtttcttccacacgatttcattggtcttcagatccaacgcggaaatatagccccaggccggttgtttacacggcaggccaaacggcgaaaggaacggattcagcgtgacgccgaatggtacgccgtactgtggctgaatacccgcttctgtaccggtacctttcgcgtctttcggcggctccattggattacccgggccgcgtgggatcagcttcgagacaaacggcagcgccatcgggttagcgatagcgacctgacggtctggatcgacggaaataccgccccattcaaacatccccaggttgccagggaataccaatgtcccctgctcggacggcggggtgaagataccttcatagcgcaactggtggaacatgacgcggcacaccagttggtcgaacatggtcgcgccccacatatccgcgccggagagatcttttttcgggcggaaggttaaatcagagaacggctgagttttggcgacgtaatcgccttttgccgcgccctgcgggaccggtttttccggggcgggcacgaccagctcgccattacgtctgtccagcacaaagatattaccggttttcgctggcgcatagataaccggaacggtagtaccgtcaacggtaatatccgccagcgtcggctgtgccggcaggtccatatcccacagatcgtgatggacggtctgataactccaggccagtttcccggtggtggcattcagcgccaggatggagctggcataacgctcctgctccggcgtgcggttaccgccccagatatccggcgtggtcacgcccatcggcagatagaccagatccagtttcgcatcataggcggcaggcgcccaggagttcggcgagttaaaggtaaaagcgtgctcatcggctggaatcgcgttcggatctttcgcccccggatcgaaggcccacatgagtttaccgctattaacatcaaaacctcggataacgccggacgtttcgcgggtagagaagttatccgtgaccgaaccggcaatgacaattgttttatcggtgataatcggcggcgacgtcggttcatacagtcccggtgtggtatccggcatattggtttgcagattcaggacgcctttgttggcgaaggtttcacacagcttgccggtttcggcattcaccgcgaaaaggcgaccgtcgttgaccgggaggataatacggcgcggacagtcggcgatgacctccggcgaggcggtatccgctttggcctcatgataagagacgccgcggcaggtcacatgctggaaagacgaatcggtcttcaactgaggatcaaaatgccacttctctttaccgctggcggcgtccagcgcgaacagacgctggtgagctgtacacagataaagcgtatcgccgacttttatcggggtcacttcgttggtgatttcacccggatcgttgggctgtttcagatcgccggtgcggaagacccacgcttctttcagttggtgaacgttatccgcagtgatctgtttcagcggcgaatagcgttggccttcctgattgcgcccataggccggccagtcttcgtcggcgatcgacgaacttgttgcggcgggcgtggcgtcggcgcgaagcgtaccgttgatctcctgcgggtcgttgaagccggcccaggtcagaatgccgccgctaatcagcaacgccacgaccagcgccgccactgcgccactggaaggaaccaccagccgatgccagacaaacggtaatattagccagatgccgaaaaacaccaggatatcgctacgcggcgtgagcgcccagaagtcgaacccgacttcccacacgccccaaatcattgtcgccagcagcagggcggcatacagccacagtgcggcacgtttactgcgccatagcaatccggccacaaccagcatcacgaggcccgcgatggggtagtaccaggaaccgccaatagcaaccagccagacacctccgataagaagatacagcccacaaagtgctgcaaagagggccgtcagcgtcacgagtaatcgtggcgatcgtgcgttattttctgccataaaaagacaccatcccaaattgttaattttttagtagcaattaagtataggaattaacatgtgtgatcgtcatcacaaaatgagctttcttatcaaatgccgcgaatgaatacgtttgctgttatactgcgtgccttgcgcgtcaatgcggcgttattagtcaccggcattgagtgatttgtttttaaatcatatggttataaatatgaaacatactgttgaagtcatgatccccgaagcggagatcaaagcacgtattgccgagttgggtcgtcagattaccgaacgttataaagacagcggcagtgaaatggtgctggtaggtctgttgcgtggctcatttatgtttatggcggacctgtgccgtgaagtccaggttcctcatgaagtcgattttatgaccgcctccagttatggtagcggcatgtccaccacccgcgacgtgaaaatcctcaaagatctggatgaagatattcgtggtaaagacgtgctgattgtcgaagacattattgattccggtaatacgctgtcgaaggtccgtgaaatcctgggcctgcgcgagccgaaatcgctggcgatttgtacgctgctggataaaccttctcgccgcgaagtggacgtgccggttgagttcgttggcttttcgattccggacgaatttgtagtcggttacggtatcgactacgctcagcgttatcgccatctaccgtatgttggtaaagtggtgctgctggacgagtaagcgcagaaatgccggatggcgtcgctaaagcgacttatccggcctatagctaatggcttattggtggggaatgtatttcagacttagggcggaaatacccttatgatagccgttctccagcgtttctctgttggtggcggtgacgtcaagatcgcgcagcaggccatcattgatactgtacgcccagccgtgaatggtcacattctgaccgcgtttccacgctgactgcataatggtggaatgccccaggttatagacctgttccatgacgttcaattcatagagcgcgtccagacgttgctcttcgggcatttttcccaacagcgagctatgtttaagccagatgtcgcggatatgcagcagccagttattaatcaagcccagctcagggttttctaccgcagccttgataccgccgcaaccggagtggccgcaaatgataatatgctcaacttccagaacatctaccgcatactgaaccacggagagacagttcagatcggtgtgaataaccaggttagccacattacggtgaacaaacaattcgcccggttcaagcccggttaaacgctctgcgggaacgcggctgtcggaacatccaatccatagaaagcgcggtttttgcgcttgcgccagtttctcaaaaaatccggggtcctcttccaccagcatttttgaccatagtgcattgttgctgatgagtgtatctatgtctttcatggaagttaacgacctgtaaccaaataagtgcgttgggctaatatagggcaactccgtaattatttaaaccatatataaagtgtaagaacgtaaagtaagtgagaatttatgaccattgcgctggaacttcaacaacttaaaaaaacctatcccggcggcgttcaggcgttgcgcggcatagatttgcaggtcgaagcgggggatttttacgcgcttctggggccaaatggagcagggaaatcgaccaccatcggtattatcagctcattggttaataaaacgtccgggcgcgttaacgtttttggttacgacctggaaaaagacgtggttaacgccaagcgacagcttggactggtgccacaggagtttaactttaacccgtttgaaacggtgcaacagatcgtagtgaatcaggcgggttattacggcgtggaacataaagaggcggttttacgtagcgaaaagtatttaaaacagctcgatctgtgggaaaaacgtcatgaacgcgcgcggatgctctccggtgggatgaagcgccgcctgatgatcgcccgcgcgctgatgcatgagcctaaactattgattctcgatgagccgacggcgggcgtcgatatcgaattgcgtcgctcgatgtggggattcctgaaagatttaaacgccaaaggcaccacgattattcttaccacccactatctggaagaggcagaaatgctgtgccgcaatatcggtattattcagcacggcgagctggtggaaaatacctccatgaaaaatctgctttcaaagctgaaatcggagacgtttattctggatttagcgccaaaaagcccgctacctaagcttacgggttatcaatatcgtctggtggatacctcgactctggaggtggaagtgttacgcgagcagggggttaacagtgtctttagccaactgagcgagcagggggttcaggtattaagtatgcgtaataaagccaaccgtctggaagaactgtttgtgtcgctggtgcatgaaaaacaaggagatcgcgcatgatgcagctttactgggttgcccttaaaagcatctgggcgaaagagatccaccgctttatgcggatctgggggcaaacgctggtgccgcccgtcatcaccatgacgctctattttattattttcggtaacctgattggttcgcgcatcggcgaaatgcatggttttagctatatgcaatttattgtgccgggcctgattatgatggcggtcattactaactcctacgcgaatgtcgcgtcgtcattttttagcgccaagtttcagcgcaatattgaggaactgctggtcgcgccggtaccaacgcacgtgatcatcgccggatttgtcggcggcggcgtagcgcgcgggctgtgcgtagggattctggtgacggcgatttcgctctttttcgtgcctttccaggtgcattcctgggtatttgtcgcgctaacgctgattctgaccgcgattctgttctcgctggccggactgctgaacgccgtgtttgcgaaaacctttgacgatatcagtctgatcccgacctttgtgctgacgccgctgacctacctcggcggggtattttactcgctgacgctgctgccgccgttctggcaagggctgtcgcacctgaacccgatcgtctacatgatcagcggtttccgttatggttttctgggtatccatgatgtgccgctggtgacgacgtttggcgtactggtgatctttatcgctgctttctatctgctgtgttggtcgctgatccagcgcgggcgcgggttgcgcagttaagcgctgactggggagatggggcgttgggttgcgcttcgcttcacttcatctacgggtccgtaatatcaatgggttacgggtcggtaggtgaggcttgtcgaaacccaacgcttctctcagcgaatctgaatctccagcgtggcggtggcctggtattctccggtgtggggaacatgtccggtggtattgaccggcgcggcggtgaactcggtgctgcctctaccgtcagtgtaatcttcaatcggcaattcggcgctgccgccgggaacgatggtattatcgtatttatcggaaatccgtatccccaaattctcattgtcagttttcaggtagtccgggttgtgcggatcggttgcgccatttaatgacattgacaggttggtgccgtccgccacgttgctacaggtaaagtttacctgagtggtgacgtgcgagttctgcgggctgtcgccgaggtgacgaatatctttgccctcaatatccggtagcctgacctcgataacctgcccggcgttgatggagcaggactgcggcacggtaatggtcccggacatggtgacgtgcgccatcggtggaacggaagggggaatattatctccgctgctgcccggcgtttttgacaaatagagattcataatcgtcgtctcaggaatggtgatttcacctaccaatgggtgagtaatataaatacgcacgttacccttattccctgcggacattttgtttatgtccgcgcccgtacacccgcctgcggtggggtcctgattactgatcgctgaaaagggaacggggatatactgtttcaggttaccgacgatgtaggtttccgtaccaatctccagcttacccgcgaccagaacataaaaatccatctgttgcccattgctacccgcttcgctgtacgttcctttttgtgttaaatcgccggtcgtggcggtgaaatagttaacgccctgataatctttattatcgcagtcgcacctggcgctgtattcgccgccgaccgaccaactctctttgactattttccctgcctggttctcatccgtatcggtaatggtctggtcaaggggaaaaaagaaattatgcgtgccgctggtgggttgacaccagccgcttccgttgcccatcgttccgtctgccagcgcatggcctgaaaatagcgatagcgccagcagcatccataaattcttcattgtgttcctcactggcagacggcgttcgccatcactatgccgttcatatttttgctgatatccaggcggtaatccgcgcggcaagaggcgcttccccagttcaccagcagcaggccctcttccggcaggccgctgaggaagacctggcctttatcgccgacgatactggccaggttcgcatcctgcccatcgacgcttgccgtcgcgccaaagggcacgggctcgccattgctgcgcgtcagcgttaacaacacgcgatagcccttatgcgtgtcatacgccgcgcgcaccaccgcattacgcgtcgggtagacggtctggttgttgagcggaatatccacgttgtcagcaaacgtgctgctgtcgagcgagatatcgtagcgataatacggcgtgacgttggggatcaccgtataaccccggaagtcggtggcgacgccggtctggttttcaaccgaaacgccgctggcgccgggcgctttaattaaaatcgccgcgccggtaatcggctggctcagggtaataccgttttcgtgcgccagaatgccgccgctgatgccgtagctgacttgttggctatctggcgactgattgtaaccggcgttgaggttggcataagtgcctttatagctggcgtttaccccgccggaatcaccgtcttgtgtgctgtggctttgctgtaacgaccagttcaggtttctgtcacgcagcgcggtgccgctaagggtggtgctgttcaccgtggcatcgtgcttacgcgtgttcagcatatagctggcgtatagcctggaatcgaacaccgtaaacggaacgtgcagcgacagcgtgaacagccgatcgttctggttataacgatcgtcgtcgttgtcatcatcgtcattgtccgaacggtactggtaggtgtttttgttatagctgtagctcagcgtatagctcaccggaccccagctattgttgtagctggcgctcagggattccatctgctgcgcgctgtgccagtaatcttctttgacccaacttagcgttaaggaaccgagcgtattgctaatttgctggttgaccgaagcttcgaaacgattatggcgcttgccgtagttatcataaaaatcgtcgtccgggttgatcacctcgctcagcgaattgtagttttcgctggcgtaacgatagccggccagcgaaaacgtggtgcccgtactgacgacgcccttgctgtagcggacgtgccaggattgcccgatttctttgcggccatcgtcaaatttggcgtgcgaccagatgccgtccagggaaatggcccccagcatctgcatattttgcccgacgccgaaggcgacggactggtatttatcgccggcaatctggctgccgccgtacagggtgatgccccacggcaggccgtacagcagggtcgcctggccgaagtcgtccagcgcgtggttgttataatcgcgatatttacccacggtcacgctgtattttgcccgtccggtgcgctgcagaatcggcagcgaagagtagggcacgataaaatgctgttcgctgccgtcggcttcttttaccgtcacgtcatagtcgccgttgctgccggtgggaaacatatcgttgatttcaaattcgcccggcgaaacggcggtctgataggcgatatagccgttttgccgcacgataacctgcgcgtttgagcgggcgatgccgcgaatcgtcggggcgtaaccacgctggctgttgggctgcatttgatcgtcagaggtgagctggaggccgcgaaaaggtacgctgtcgaacacgtcggatggcgtattgctgtctccggcggtgaactggcttttcagcgcgataatgtcgcgctgtaaatagttataaacgctgttccagctaccgttctcgccgttatttgaactccagttactgtagttgcgaaaacgccacggcccgaggttaaaacccggctggagagcgagatacttcgattccgcatcgtcggaatcctcactggaaccgtactctttatagccgctgaagctgtagttcagcatcagcgcggtaatcccctcctgccacttttccggcggtacgtagccgcgtgcgttgttggcgatgtagagttgcgggatgcttactgataatgcctgttgctgaaaatcaaaccgctggctggcgccggggataacgctgagatcgacgcagcctttttcactctccagcgttggaaaaaggtcggttttgacgccgttatcttttagttcctggagccgtaaacagccctgtaatgcctgttgaccgtcactgagcgtcgcgagttgaaaatcaacgtttcgtgcgccgatttctgttttattgatattgatagtgacgtaataggtgccaggcagctggcttttgtcgttatcaaatgtcgacagatcgacgcttgtgcgattcgcctgcccatggttttcaataaatgccggattgaaatagtcgcgcgcccatgcaacgtgtgtgaacgtgctgcccagcgcgatacacacagcgcagcgcgataaataaaatacccggtgttgccttttgcgcatcggcactctcatccctgtcactcttctcaaggcgtttgtttatgttcggggccagtaccgccaaaatcgttgatgatagaccagacaatcgggccgctggcggcggcaggcagcgtgtactgcgcgttgccgaaaggcgccacatagcgcggggctttcactttttgactgccaacggaaagggtggcgaagttcatataatagggcgtggggttcttcacggtgagcgtgcgaccctgacgcgaccacgttaaccgatcggcaacctcttctggtttttgggttaacgcttttggccggtaaatcagcttaaattccgctttaacggccagcatgagtgtgttgtgtttattgtccggattgctgctgggaatcgatttaatatccagccagtacagcgactcgcgatcttccggcaaattgccgccggtacggataattcgtagtacgttcttttgcccgccattaaggcgaaaaagcggcggggtgaccataaacggcgcatcaccgctcgccccggtttcactgatcgattgcgcccaggactgaattaaatagggaacgttgtcgctattgcttatcgatatggacgcatctttggcatcgccgtgaaaaataacccgcgttgtgccgatgtttatccctgcggcatgcgccagcgaaccgcacaacaggcaacaaagcaaccctgctttagccaatgaattcattgatgacctcaataaacaaaggggccagccgacgctggccaccaggatcagttatattgcagatagaatgttgcggttgcatcgaccgttcccgacttaacgggaaccgcggtggcgatatagcgggcggtgaaaggcattgagagttccgtcaccccctctgctgtagggaggttgactggggcagaccatgcctgaagatcgttaaaggtcataggggtgctagttttatcaagaatttgcacgccaatattctcagcatcatcctcatttttcaggatggtcgcatcggttccgtcgagtgtgccttcaaagcgcgcctgtacactgctgtagacgtttgcgtcgcagttttcgagttcgatggtgaagtctgtatcccctgccgtctgccctgcggcagtgaaaagagaggcaaattcttcctgtaatgtcacctctactgaatccgtttttaccgtacaggcgttttgcttaatgaggccggtgatatgtacggtgccgtctttggcggtgtctgccagcgcggcgggggagagggtgatggcggccagtgccacagtgagtgtttttaaggagagtttcattatctttgatcctttaagatattataaatattgacatagtaacaatatctatagtgtggaaagttattgttctttttattcccgaatgagtaaatataatgtccgatgatttttacggcgcgaagaaaaattcagaatacataaatatgaaatatttataatatatatttaatcaattattttggtgagtgtttgtttaattgaatcgccgtgattaccctttaatgggccagattctatgaaggctgctaacaattttaaaaataatgcaaatttttttgaataaaaaatgatcgtggtcatagtgtgttgtcggccaaaaaaacatgctgacatcatgcaggattggagctcaatggaggagaagttatgctgggatgggtcatttcctgtcatgacgatcgggcgcaggaaatgctcgaaggtcttgaaaagaagtatgggccgttggcgcagtgtcgggcggtcaatttctggcgtgggttaagcgtaaatatgctcagccgcatgatgtgtgacgccctccatgccaccgactccggtgaaggcgtgatatttttaaccgacatttccggcgcggcgccttatcgtgtagcgtcgctgatgagccataaacattctcaatgtgaagttatttccggtgtcagctattcattgatggaggaaatgattacctggcgagagtcaatgagcagttcagcatttcgcgaccagattgtcgcgcttggcgcgccggatgtcaccagtctctggcatcagcagcagaaaaatccgccttttgtattgctgcatgattcgtatgagttttgatcaataccattgacgacgcttttgctacaatgacggcgttttttcgcctcggttatgatatatggttatgcgcgttgttcttatcttgctgttctttttcgccggtaatgtgttggctgccttgcccgctcgttatatgcaaacgacgaaagatgccgccatctggtcgcagattggcgacaaaatggtgaccgtagggaatatccgcgccggacaaattctttccgtaacgcctgttgcggctgattattatgcctttaaattcggcttcggtgtgggctttatcgataaaggccatctggaatccgtgcagggaaaacaaaaagtggaagatggcctgggcgatcttaacaagccgctcagcaatcagaatctggtgacctggaaggacacgccggtgtataacgcgccggacatcagtagcgccccgtttggcgtattggtggataatttgcgttaccccattattagcaagctgaaaggccggctacatcaaacctggtatcagatccgtattggcgacaggctggcttatgtcaacgccatggatgcgcaggaagacaacggcattccgattttgacctatcatcacattttacgtgatgaagagaatacccgttttcgccatacctccaccacgacttcggttcgggcattcagcaaccaaatgacctggcttcgcgatcgcggctatgccacgttgacgatgtaccaactggaggattacatctataaccgcgctaatttcccggcgcgcgcggtggctatcacctttgatgatggccttaaatcggtgagtcgctatgcgtatccggtattaaagcagtacgatatgaaagcgacggcatttattatctcatcgcgtattaagcgccatccgcaaaaatggaatcccaggtcgctgcaatttatgagcgtgtccgaattgcgcaagataagcgatgtttttgattttcagtcgcatacccattttttacaccgggtagacgggcatcgccgcccgattttatatagccgcagctaccataatattctgtttgattttgaacgctcgcggcgggcgctcgcacagtttactccgcacgtattttatctttcttatccctttggcggttataacgcgaccgcgatcaaagcagcaaaagacgccggtttccatctggcggtaaccacggtgagagggaaggtgaagccgggagataatccgatgctgctcaaaaggctgtatattctgcgcacggattcgctggaaaccatgtcgcggctgatcagcaaccagccgcagggataaggactatcaggcaacctgtaccggaatagctttcgcggtgcgcttcatttcgttgtcgccttcaaaataggccactttcggacgccatgtacgcgcttcttcatcagacatggtgacgaagctggcgataatcacaatgtcgccaacttcagcgcagtgcgccgccgcaccgttcaccgagatgattctggagccgcgttcagccgcaatcgcataggttgagaaacgtttcccattggtcacgttccagatatcaatcgcttcgttttccagaataccggaggcatcaaggaaatcctggtcaatggcacaggaaccttcgtagtgcaggtccgcctgcgtgacttttacgcggtggagcttgccttgcagcatggtgcgaatcataacttctttaccctgtcgtttaccttggctaagcaggcgcttgtggcctgctttggaaattctcaggcagtattgcccgatttttaacccctgtctactgggctaatgtaacgctttgattatcgatcagacgcgcctgacccagccaggcggcagccagaatcactgcgcgtttgctggtttccgtcagctccagcagcgtgtcggcatcacggatttgaatgtcgtcggcacggaagcctttttcattcagttcctgttcggcaatggcaataatctcttgcagctcacgattacccgcaatcagtttttcagcgatgctattcatcacgttgtatagacccggcgcaattttgcgctgctctgcggtcagataagcgttacgtgagctgagcgccagaccgtctttagcgcgaataatcggcacgccgacgatctcaatgtcataactcatatccgccaccattttgcggatcagcgccagttgctggaaatccttctcgccaaagcaggcgatatccggctggatcaggttgaacagcttgctgacgatagtcgagacgccgcggaaatgacctggacggctggcgccttccagcatggtagagaggccgggaacatcaacgtacgtctggccttccagcccatgcgggtagatttcctcaacggctggcgcaaagacataatcgactttgcgtttgttcagcttttcacaatcttcctgcagcgtgcgcggataacgcaccagatcgtccggccgatcaaactgcatcggattgacgaaaatgctgacgatcaccacatcagcccgggcttttgcctcatcgaccagcttcatatggccgtcgtgcaggttgcccatggtgggaaccagtgcgacgcgtttaccttcctgacgcagacgacgaatatgctggcgcagcagcggcagggtttcaatgattagcacaacaaaactccttgagttgcttgatgatcctgcccgatggcgctgcgcttatcaggcctacatccgttgaggatctgtaggccggataagacgcgtcgcgtcgccatccggcacggtcagaaaaattagtgaaagctgtgttcttcgcccggataaacgccggactccacttcagccatatactgctgtacggcggcgcgcatgtcgcccgcttcggcgaggaaatttttcgcgaattttggaatatgaccgccggtgatgccaaacgcatcgtgcatcaccaggatctgaccgtcggtgacgttgcccgcgccgatgccgatcaccggaatcgacagcgcttccgtgacgcgcttcgccagctcaaccggcacgcactccagcaccagcagttgagcgccagcggcttctaaagccagcgcgtcatccagcagcacttgtcctgcatctccacggccctgaattttatagccgccgaagatattcaccgactggggcgttaaccccagatgaccacaaaccggcacggcgcgttcggtgagcattttcaccgtatcaaccagccaggcgccgccttcaattttgaccatattggcccccgcacgcatcacgatagccgcgttttcacatgcctgttccggggtggcgtaagccataaacggcaggtcggagagcaatagacagttgggcgcgccgcggcgtaccgcgcgggtgtggtaggcgatatcttccacggtgacaggcagggtggagtcgtgcccctgaattgtcatgcccagagagtcgccaaccagcatcacattgataccttcgtcggcaaataacttagcgaagctgtagtcgtaggcggtaattgtcgcgaagcgttttttctcttgcttgcatttctgcagcagtgaaatggtggtgggtttcataacgtttcctgatggtaaaagttatatttcccggcattctaacagtcatattcaggggggcaattgatttaagcaatcgtttggcgctaaagcagtaaacgctaaaggggaggcgatgttttaccagtgggcgggttttgcagcaccaagatgggtgagatgctgatgcaggctgataccatccggaaagatcagatcaggagcgatttcgaataacggccacagcataaaaccgcggtttttcatgtcgtagtgcggcacggtcagacggtcggtgttaatgacttcatcgccaaacagcataatgtcgagatccagcgtgcgcggcccccagcgttcggctttgcgcacccggccctgttgcagctcaatgcgctgggtatggttaagcaattcttcgggggcgagagcggtatccagcgccaccgcagcgttcaggtaatcgggctgatcctgtgggccaagcggcggcgtgcggtaaaacgaagaaaccgcgacgatacggctatcgggaatgtcggcgatagccttcagggcggcattgacctgctccagcggagaggccagattactgccaagcgcgatatacgcgatcgtcatacggtgccctcgcggcgcggcgcgcgtttgcgcggacgtgaacgacggcggcgtggagcaggatcgtcgtccagctcgttgagcatccctttttgttccggcggcgcggaagcctgaaactcggcccaccactgcgccagacgttgcagttcagtattattttccacctgagcgcgcagctccagtaaatcaaacgcggcgcggaatttgggatgttccatcagtttccaggcgcgtttgccctgacgtcgcgacatgcgtaactgaagctgccaaatatcacgggtaagcgtggtaaggcgtttcgggatcgccagtgaacggcaggcctcatccagcacatcattcatggccagcgcgaaagcgtcgtaataggccagaccgctctcctgagcgattttttgcgccatctccagcagcggataccagaacatggcggcaaacaaaaatgccggattaacgcgcatctcgttacggatgcggttatccgtattcttcaacacctgcgcaatgatgcgttccattgcgctgtcgccgttttcggtgaaataacgcgtaatggtaggaaacaacggctggaagaggtggtattcccgcagttgttgataggtttcgtaaccgttccccgcctgcaacagcttcagcgactcttcgaacaggcgcgcgggaggaatgtcgtttagcaaggttgccagacgcgggattggctcagccgtttcagggctgatatgcatattgagcttcgcagcgaaacgcacggcgcgcagcattcgaaccggatcttcgcggtagcgcgtttccggattgccgatcaggcgaatcacgccttcttgcagatcctgcatcccgccgacgtaatcgcgcacggtaaaatccgccacgctgtagtaaaggctgttgatggtgaaatcgcggcgctgggcatcttcttcgatagagccgaagatgttgtcgcgcagcagcataccgttttgcccacgctgggaggtcgtacggtcgctttcactgccttcatgatgaccacgaaacgttgccacttcgataatttccgggccaaacatcacgtgagccaggcggaaacgacgtcccaccagacggcaattgcggaataatttccgtacctgatccggtgttgcgttggtagtcacgtcgaaatccttcggctttttgccgagcaggagatcgcggacgccgccgccgaccaggtaggcttcatagcccgctttgttcagcctgtacagtaccttgagggcattttcactgatatctttgcgggagatagcgtgctgttcacgcgggataatcgtcatatgtggacgggcgacggcttgttctgcctcgctctcctcgcggcttaacaccttacggcaaaaattagcgactcgggtaaaaatagcgcacctcggtagtgtcatacattaataagatcaacttactctatgtctttcgcattacggcagacgggcgtaagagagcaacgcgacctgggctgtaagcatcattaacgccgcagcaatgcgaaagacgatgagcaaaaatagcggctaatcatagctcagcgagacgcatttgagaatgccggatttacattagccgatgtgggtacggctgtaagcctccagtgcgccactgcaaagtgcagcaactcctcaacagacatctcctgccacgctacgacgtcgcgttggcctaaaaagcgcaatgcctggaccagtaccgggcgcggatcgcctgtcgcaagcgcaggggcatgattttgcttggaaagtttagcgccttgttcgttgagcgccagcggaaggtgcacgtagcctggcgcacgccagccaaactgtttatacagcgaaagttgtcggacagtgggttcgattaaatctgcgccgcggacgatctccgtcaccccctgaaaatgatcgtcgaccaccacggccagattataagcaaacagtccgtcgcggcggtggataataaaatcttcgctcgccagctgtgggtcagcctggatgtcgccgcgcaaggcatcatggaaatgcatcaccggatgctgctgtttaattctgacggcggcattctccggcccgtggcataacgtccgacaatggccgtcgtaaataccgcccagacgttgaatgcgcgagcgggggcaagtgcagtagtagctcagtccctgctcgtgaagccaggccagcgcctcgcgataagcctcatgacgctgtgattgccataagacctcgccatcccagtgcaggccgtaatgttccagctggcgcagaatggtcgctgcggcaccgggaacttcacgtggggggtcgatatcctcgatgcgaacgcgccaaattccgcgttgcgcacgggcttgtagatagctgccgagggcggcgattaacgagccgaaatgcagttcgccggatggcgacggcgcgaaacggccaatatagtgtgagtcagtcatgctgcgggcaataaagaataaggcgggaaaactcccgcctgtcataaatagggtagaaacgaacgggattaacccgccatctgtttttcgcgaatttcagccagcgttttgcagtcgatgcacagatcggctgttggacgcgcttccaggcggcggataccaatctccaccccgcaggactcgcaataaccgaagtcttcatcttccactttcttcagcgtcttctcgatctttttgatcagtttgcgctcacggtcacgattacgtaactccaggctaaactcctcttcctgcgcggcgcgatcgaccggatcggggaagttggcggcttcgtcctgcatgtgcgtcacagtgcgatcgacttcatcccggagttgattacgccatgcttcaagaatacgcttgaagtgcgatagctgggcttcgttcatatactcttcgcccggtttctcctggtacggctccaccccagcgatggcgagaatactcagggacgatgttttacggttttgcccttcttgcatgttgcttctccttaacacgcactatcgatccccatgttcgggggaaaatcaggtcgctataaatagcagatgcttttccggatagcaattatctaaacgtaacacttgacaaccctgtgaggaaaagcgtatttacgcacgcggccagaatacttaataatcaggctgttattccactacaacgttatgggtactggttcgttcagttccattttttgggctgaaagttctgctttataagctaaaacttccacgcctttattctgagcctcgctcaatagctgcgcgtattttatatcgatatgacgtgcgggggaaaaacgtgtaatggcggagtgcagcaccgcgaacaccaccactgcgcgatgacctgccgccgcaacgcccatcaattcccgaagatgtttttgccctcgttcggtgatggcgtcgggaaaataaccgttttctttttccgctaacgtgaccgatttcacttcaatatagcagtccgggcggaaatctgcctgtaacataaaatctatacggctgcgctcggcgccatatttgacttcacttttcagaatattgtaccccgccagcgccggcaggcgattctcctgaatcgcttctttcgttagctggttcgcccgcagcgtattcacgcaaatgaatgcgccggattgcgtttcagtcaattcccaggtatgcggatatttgcgtttagtattttctgatgtcgaataccagacggtatcgccaggcgtggcgcagccggtcatcgcgccggtattaggacagtgcagcgtaagcgtcgtaccgtcaggggtgatcacatcggctaaaaaacgtttatagcgctgaatcagcgtagcgcgttgtaaagggggtgaaaatagcatcgacattccttcattattattcgcccagcgtccagcgctgcagctcggcatagcgggtacggccttgcccatacgaagaggcgtaaagcgcaaacgacgtgaccggaaatgaccagcaaaagcccggcggcgggatagccaccgtatggctggcgtcgcgcagcagcgtaatatgcgggtgaaaaggctgcgggctttggtaacaaccgctgcgggcggcctgcgcgcgcagcatattagccaactgcaacaacccgcgcggcggctggcgcatccccagccacaccacgcgcgaacgcagccactgaccggcgtcatccagatgtagcgtaaagcccggctgtcgaattcgtccggccagttgcgcaagcgagcgctgcttatcgctactgacgtcgcctaaaaaggccagcgtcaggtgcaggttcgccgctgccacggggcgtccgtcttcagacgcaaaatgggcggcgcgccaggcgataatttgcgcgcgcgcgtcgtcgggtaagtcaatcgcaaaaaacagccgttttggctcagacatagggatactcggttatggattaacacgatgctacaatgcggcgcaaagaaagttaaccccgtggagccgtttgtgacgtcattgcccgttgccgccgtattgcctgaattgttgacagccctaaaaatcgcgccgcaggttttgttgtccgcgcctaccggggcggggaaatccacctggctgccgttgcaactcctgcaacaggggccggttgctggaaaaatcctcctgcttgaaccgcgtcgtctggcggcgcgtaatgtcgcacagcgtctggcggaagcgttgaatgaaaagcctggcgaaacggtaggttaccggatgcgcgcgcaaagctgcgtggggccgcgtacccggctggaagtggtgaccgaaggcgtattgaccagaatgattcagcgcgatcccgaattacgcggcgtggggctggtgatactggatgaatttcatgagcgcagtttacaggcggatttagcgttggcgctgttgctggatatccagcaagggctccgtgacgatctcaggctgttaatcatgtctgcgacgctggataacgacaggctttgtcagcgactgcctgatgcgccgacgatcgtctcggaggggcgcgcgttcccggtggagcgacgttatcagccgcttgcggcgcatttgcgttttgatgaagccgtcgcgatggcgacagcggaactgctgcgcaatgaaaacggttcgctgctgctatttttacccggcgtaggcgaaatacagcgcgttcatgaacatctggcgtcgcgggtagggagcgatgtcctgctttgtccgctgtatggcgcattgtctctggaagcgcaacgcaaagcgattgttccggcacccgccgggatgcgtaaagtggtgttggcgactaacattgccgaaaccagtttgacgattgaagggattcgtctggtcgtcgatagcgctcaggagcgcgtggcgcgatttgacgcgcgaacgggactgacgcggctggttacgcagcgtatcagtcaggcatcaatgacgcagcgcgcggggcgcgccggacgactggcgccgggtatctgtttacatctgctggccaaagaacaggcggagcgggcggcggcgcaaagcgatccggaaatcttacacagcgacctttccggtttattgatggaggtgttgcagtggggatgtcacgatccggcatcgcttttctggctggacaggccgccggaggtgaatcttcaggccgcccgccgtttattattgatgttaggcgcgctggagggcgagcggttaagcgcgcggggccggaaaatggcggcaatgggtaacgatccgcgcctggcggcgatgttagtcaacgccggcgagggcgatagcgccgccactgccgccatgctcgcggccatccttgaggacccgccgcgcggcggcggtacggatttaagcgtagtattttcgcggcgacagccgggctggcagcagcgtagccagcagcttttaaaacggctgcaggtgcgtaatggcgagccggatagcgcgcttattatgccgctgttggccagagcgtttagcgaccgcatcgcgcggcgtcgtggtcaggaagggcgctatcagttagccaatggtatgggcgcgatgttagatgcggatgacgcgttgggacgtcatgaatggctgatcgcgccgctgttactgcaaggtagcgcctcgccggacgcccgaatattgttggcgcagccgctggatattgcctcgctgattcaggcgtgtcctgatttactgcgccagtccgacacggttgaatgggacgaggcgcagggaacgttgaaagcatggcgcagaatgcgtattggacagttgacggttagcgttcagccactggcgaagccgtctgaagaggagcttcatcaggcgatgctgaacggcatccgcgataaaggtctgtccgtccttaactggacgccggaagcggagcagttccgtctgcgtctgcactgtgcggcgaaatggctgccggaatatgactggcctgccgtggatgaggcgtcgctgctggcgactctggaaaattggttgctgccgcacatgacaggcgtacagtcgttacgagggctaaaatccctgaacgttaatcaggcgttacggggactgcttgactatgccatgctgcaacgtctggatagtgaactgcctgggcattacactgtgccgacgggaagccgaataacgattcgttatcatgaagataacccgcccgcgctggcggtcagaatgcaggaaatgtttggcgaagcgaagaccccaaccatcgctcagggccgcgtgccgctggtgctggaactgctttcgccagcgcagcgaccgctacagattacgcgcgatttaagcgctttctggcagggggcgtatcgcgaagtgcaaaaagagatgaagggccgttaccccaaacatgtctggccggacgatccggcgaatacggccccaacgcggcgcacgaagaagtattcgtgacgtgttatacgttgcctccaggccagataaggcgttaatcgccatccggcaaaagagtaaattgagagatttcttcttctgtcgtctggcggaagaatagagaatcgggcctttgcgcctgtatgttgcggagaaaaagcatggcggggaatgaccgcgagccgattggacgtaaggggaaaccgtcacgtcctgtgaaacaaaaggtgagccgtcgtcggcagcatgacgacgattatgatgatgactatgaggatgaagaaccgatgccgcgtaaaggtaagggcaaagggcgtaagcctcgtggcaagcgcggctggctgtggctattgctaaaactgtttatcgtttttgtggtgctgttcgccatttacggcgtctatctggatcaaaaaatccgcagccgtatcgatggcaaggtctggcagcttccggcggcggtatatggccggatggtgaaccttgagccagacatgcctgtcagcaaaaacgagatggtgaaattgctggaagcgacgcagtatcgtctggtgacgaagatgacccgtcccggcgaatttaccgtgcaggccaatagcattgagatgatccgtcgtccgtttgacttcccggacagcaaagaagggcaggtgcgcgcgcggctgacgttcagtgacgggcgtctggaaaccatcgtcaatctggataacaaccgccagtttggcttcttccgtctcgatccgcggcttatcaccatgctttcttcgccaaatggcgagcagcgtttattcgtcccgcgcagcggtttcccggatctgctggtcgatacgctgttggcgacggaagaccgtcatttctatgagcatgatggcattagtctttactctatcgggcgtgcggtgctggccaacctgacggcgggacgcacggtgcagggggccagtacgctgacccagcagctggtgaagaacctgttcctctccagcgaaagatcatactggcgtaaagcgaatgaagcctacatggcgctgatcatggatgcccgttacagtaaagatcgtattcttgagctgtacatgaacgaggtctacctcggtcaaagcggggacaatgaaattcgcggttttccgctggcgagcctgtattactttggtcgtccggtagaggaactgagcctcgatcagcaggcgttactggtggggatggtaaaaggggcgtcgatttataacccgtggcgtaacccgaaactggcgttggagcgtcgtaacctggtgttacgcctgttacagcagcagaaaatcatcgatcaggaactctatgacatgctgagcgcgcgtccgcttggcgtacagccgcgcggcggcgttatttcaccgcagccagcgtttatgcagatggttcgtcaggaactgcaggcgaagctgggggataaaattaaagatctctccggcgtgaagatcttcaccacctttgactccgtggcgcaggatgccgcagaaaaagccgttgtcgaaggtattccggcgttgaagaagcagcgtaaattgagcgatctggaaaccgcgatggtggtggtggatcgctttagcggcgaggtgcgcgcgatggttggcggggcggagccgcagtatgccggctataaccgtgccatgcaggcgcgccgttccatcgggtcgctggcgaaaccggcgacctatctgaccgcgttaagtcagccgaacttataccgtctgaacacctggattgccgatgcgccgatttctctgcgccagccgaatggtcaggtctggtcgccgcagaacgacgatcgtcgctacagcgaaagcgggaaagtgatgctggtggatgcgttaactcgctcaatgaacgtaccgacggtcaatctggggatggcgttaggtttaccggcggtaaccgatacctggacgaagctcggcgtgccgaaagatcagctcaatccggttccggctatgctgttaggagcgctgaacctgacgccgatcgaagtggcgcaggcgttccagactatcgccagcggcggaaatcgcgcgccgttatcagcgctgcgttcagttattgcggaagatggtaaagtgctgtaccaaagttatccgcaagctgaacgcgccgtaccggcacaggcggcttacctgacgctctggacaatgcagcaggtcgtccagcgtggtacggggcgtcagcttggcgcgaaatatccgggtctgcatctggccggtaaaaccgggacgacaaacaacaatgtcgatacctggtttgccggtatcgacggcagccaggtgactatcacctgggtaggccgtgataacaaccagccgacgaaattgtacggcgccagcggcgcgatggcgatttaccagcgctatctggcgaaccagacgccgacgcctttagttctgacgccgccggaagatgtggtggatatgggcgttgattacgacggtaattttgtctgtagcggcggtatgcgcactctgccggtctggacggacgatccaaatacgctgtgccagcagggcgagatgatgcagcaacagcagcagccgtcaggcaatccgttcgatcagtcgtctcagccgcagcagcctgcgcagcaacagccgccgaaagaagagaagagcgacggcgttgccggctggattaaggagatgttcggcggcaattaatcacggtaatagtgccgggtggcgctgtgcttacccggtctacaccgttacgaccccattatgtgcgacgtaggccgaataagacgcttacgtcgccatccggcaaatcctccataaataacatttcagtctaatttattaacccttccttttcatctggttatttcttaaccccttagttttcgtagggccgcgtatcgcttgccattgcgacgatatttcgcctatcatgctgcggttataataataattatcgtttacgttatcattcactttcatcagagatataccaatggcgcgtcttaaaactgctcagccaaactcctcactgcgtaaaatcgcagttgtagtagccacagcggttagcggcatgtctgtctatgcacaggcggcggttcaaccgaaagaagaaaccattaccgtaaccgcagcgcctgccgcgcaggaaagtgcctggggaccggctccgaccatcgccgcgaagcgttccgccaccaccaccaaaactgatacacctatcgaaaaaacgccacagtcggtttcggtggtcactaacgaagagatgcagatgcatcaattccagtcagtaaaagaagcgttgggttacacgccgggtgtaacggtaagcagccgcggcgcttccaatacctatgacttcgtgattatccgtggcttctcttccgtcggcctgagccagaacaactatctggatggcctgaaattgcaggggaacttctacaacgatgcggttattgatccctacatgcttgagcgtgttgagttgatgcgtggcccaacgtccgtcctctacggtaagagcaacccgggcggtatcatttcgatggttagcaagcggccgactactgagccgctgaaagaaattcaattcaaaatggggacggacaatttgttccagaccggttttgattttagtgattccctggatgacaacggtgagttctcatatcgtctgacggggctggcgcgttcgacaaatgagcagcaaaagagttctgagtcgcagcgctatgcgattgcgccctcttttacctggcgtcctgatgagaaaacgaattttacgttcctttcttatttccagaacgaaccagagaccggctactacggctggctgccgaaagagggaacggttgaaccgttaccgaatggtaaacgcttgccgacagatttcaatgaaggggcgtcaaacaacacctattctcgtaacgagaaaatggtgggatacagtttcgagcatggcttcaacgacacttttaccgtgcgccagaatttacgttttgtcgaaatgaaaaccgcgcaaaaaagcgtctatggcacggggattgcggcggacggccatacgcttaaccgcggtactatcgttgacaacgagcgtttacagaatttcagcgtagatacacaactggaaagtaaattcgcgaccggcgatattgatcatacgttgctgacgggtgtcgatttcatgcgtatgcgtaatgatattaacgcgacgtttggtagcgcgccgtcaatcgatctctataacaattaccatcctgaatactttgctttcggcggcgctgagccgtaccagatgaacgaaagtaaacaaacaggcctctatgttcaggatcaggcggaatggaataagtgggtatttactctcggcggccgctatgactggtctaaacaagcgacaacggtgcgtcagaattccactacgccgacagaaggatatattgaacgtaatgaccaccagttcacctggcgcggtggcgtaaactacgtattcgataatggaatttcaccttacttcagctatagccaatctttcgagccaagcgccttcgatttgtggagcaccccacgcgtttcttacaagccgtcaaaaggcgagcaatatgaagcaggggtgaaatatgtaccgaaagacatgccggttgttgttacgggtgccgtttatcagctgaccaaaaccaataacctgaccgccgatccaaccaacccattagcgcaggtgccggcaggcgaaattcgtgcgcgaggtgtagagctggaagccaaagcagcattgacggctaacatcaatatgacggcgtcttacacttatactgatgctgaatacacgaaagacactaatctgaaagggaatacgccagagcaggtgcctgaacacatggcgtcgttgtggggcgattacaccttcaacgaaggtccgttgtcaggtttaacgctgggaacaggcggtcgttttattggttccagttacggcgatccggctaatagcttcaaggtaggcagcgcagcggtgatggatgcggtcgtcaagtacgatctggcgcgttttggtatggcgggctccagcattgcggttaacgttaataatctgctcgaccgcgaatacgtcgccagctgcttccagacctacggctgtttctggggcgcagaacgtcaggtcgttgcaacggcaaccttccgtttctaatttctttttgggcacggcttgccgtgcccgttttacaagttggctgcgatgcaggaaaaccacattcattccgataccacctttgcgctgcgaagcgtcgcctttcgtgtgccgggccgcacgcttttacaccccctctcgttaacgtttcccgcaggtcgcgtcaccggacttattggtcataatggttccggtaaatccacgctgttaaaaatgctgggccgccatcagccgccttccgaaggggatattctgctcgacaatcagccgctggcgagctggagcagcaaggcgtttgcccgcaaagttgcctatctgcctcaacaattgccacaggcggaaggaatgacggtgcgcgaactggtggcgattggccgctatccgtggcacggcgcgctgggacgctttggcgtcgcggaccgggaaaaagtagacgaggcgattacgctggtcggcttaaaaccgctggcgcatcgtctggtagacagtctttccggcggtgaacgccagcgcgcgtggattgccatgctggtcgcgcaggacagccgttgtctgctgctggatgagccgacgtcagcgctggatatcgcccatcaggttgacgtgctggcgctggtgcatcgtttaagccaacagcgcgggctgacggtggtagcggtgctgcacgatatcaacatggcggcccgctactgtgattatttagtcgcgctacgcggcggtgaaatgattgcgcaaggaacgcctgcggaactgatgcgcagtgacacgctggaacagatttacggtatcccgatgggtatccttccgcatccggcgggcgcggcacctgtgagttttgtgtattaatgcgtgatttatatcctcttactcgccgccgtttattaacggcgatggcgctctcgccgctgctgtggcaaatgaatacggcgcaggctgccgctatcgatccccgccggattgtggcgctggagtggctgccggttgagctgctgctggcgctcggtattacgccgtatggcgtggcggacgtgccaaattataagctgtgggttagcgaaccgccgttgccggattcggtgattgatgtgggtcttcgcactgaacccaatctcgaactgctgacggagatgaagccgtcgtttatggtctggtcggcaggctacggaccctcgccggagaaactggcgcggatcgcgccggggcgcgggttcgattttagcgacggcaaaaagccgctggcggtggcccgacgctcgctggttgaactggcgcagacgctgaatctggaagctgcggcagaaaaacatctggcgcaatacgatcgcttcatcgccagccagaagccgcattttatccgccgcggggggcgtccgttactgatgacgacgcttatcgatccgcggcatatgctggtgctcggcccgaattgcctgttccaggaggtgctggacgagtatggcatcgtcaatgcctggcagggtgaaaccaacttttggggcagtacggcggttagcatcgatcggctggcgatgtataaagaagcggatgtgatctgcttcgatcacgggaataacaccgatatgaacgcgctgatggcaacgccgctgtggcaggccatgccgtttgtccgcgccgggcgctttcaccgggtgcccgccgtttggttctatggcgcgaccctctccacgatgcactttgtccgcatcctgaataacgtgttgggaggcaaagcgtgagcagaaaacgtgaaatgccggatggcggcgcgaaaagcgtcttatccgacctacggttcgggcgctttgtaggccggataaggcgaagccgccatccggcgttgctgttattggcgctgtttgttgccgcctgctggctgacatgggttaacttctccgttgcgctaccgcgcagccagtggcaacaggctatctggtcaccggatatcgacatcattgagcagatgatttttcattacagccagctgccaagactggcgatttcgctgctggtgggcgcggggcttgggctggtaggcgtcctgttccagcaagtattacgtaacccgctggcggaaccgaccacgctgggcgtggcgaccggcgcgcaattggggatcacggtgactatgctttgggcgattcccggcgcgctgaccacgcagtttgccgccctgacgggagcctgtatcgtcggcgcgctggtgttcggcgtggcgtggggcaaacgtctgtcgccagtgaccctgatcctcgccgggctggtggttagcctctattgtggcgcaatcaaccagttactggtgattttccaccacgatcagttgcaaagcatgtttttatggagcaccggaacgctaacgcaaaccgactggagcggcgtgcagcgtctgtggccgcagttgctgggcggtgtgatgctcacgttattgttgttacgcccgatgacgctgatggggctggatgacggcgttgcgcgtaatctgggtctggcgctgtcgttagcgcgtctggcggcgctgtcgctggcgattgtgttgagcgctctgctggtcaacgcggtgggcattatcggttttatcggcctgtttgcgccgctgctggcgaaaatgcttggcgcaagacgtctgctggcgcgcctgatgctggcgccgctcattggggcgcttattttgtggctatccgatcagattatcctttggctaacccgcgtatggatggaggtttccaccgggtcagtgacggcgttaatcggcgcgccgctgctcctgtggctgctgccgcggcttaaaagcatgagcgcgccggatatgaacgccagcgatcgtgtggcagcggaacgtcggcacgttcttgcttttgccgttgccggtggcgcgctcctgctgctggcaacatgggtcgccctctcttttggtcgcgacgcgcacggctggacgtgggcgagcggaacgctgcttgaagaactgatgccgtggcgctggccgcggatactggcggcgttaatggcgggcgtcatgctggcggtggcgggctgcattattcagcgtctgaccggtaatccaatggccagcccggaagtgctggggatcagttccggagccgcgtttggcgtggtgttgatgctgtttttggtgccggggaatgccttcggttggctactgcctgccggaagcctgggcgcggcggcgacactgctgattattatgatagccgccgggcgcggcggtttctcgccgcaacggatgttgctggcggggatggcgctcagcaccgcgtttaccatgctgctaatgatgctccaggcgagcggcgacccgcggatggcggaagtattgacctggctctcaggatctacctataacgccactggcgggcaggttacgcgaaccgcgatcgtgatggtgattttgctggccattgtgccgttgtgtcgccgctggttaacgattttgcccctgggcggcgatgccgcgcgtgcggtgggcatggcgcttacgccgtcgcgtatcgcgctgctggcgctggcggcttgtttgacggcaaccgcgacgatgaccattgggccgctgagtttcgttggactgatggcgccgcatattgcgcggatgctcggttttcgccggacgatgccgcatatggtcatctcggcgctggcagggggcgttttactggtctttgccgactggtgcggcaggatggcgctatttccgtatcagatcccggcgggactgctttcaagctttattggcgcgccgtactttatctatttgctacgtaaacagagtcggtaaaaaaaagctgtgccacatttatgtcgggtggcagccatgctcaacccgacctacaaattacacaatatcaatatgttgtggcaatattttgtaggcctaaaaatagctgaacgctatcaggtgcgagagctgtcctgtcacgttttatcgagggaactctgcttttattttcagcaagaagcaggtgttatttttgtatcgataagtcatgagctatttcagtggcgcgccgctgtctcgtgaacagggtgactaatttcaacatatccaggcccgaaacgttgatgataaattgcggcatgatctatccaataataagaattaccggtttcggtattaagcctttttaaatattaagatgcggatgccgcatctttaatgcatctcgtaaatcaattttaatttaataataaattttcattataaaacttcgataataaaatattattttttatcgaagtaataaaaaacaactctattaaaataaattaattgccacgagtaaacaaaaaaaatgtaatttagcattttttgtttttttaatgaaatttataccaaaaataaatgttacgcgtcattgctatatattcagtactgtaattctgatctttttttattcattttgacatgtttattgtttttttggctctcccgtcttgcttgctttgtttgttttttgaacggtaaaaatatttattatttaattctgataatcctttaaataaaaaacgcttgtctttgggtttttaatggaaaatacttcaccgcgcctaagggatgttatttattaacgtgttgtttgcttcttttgaatgttgcatcggcaatttcataactcgtcatataatatatatctactaatataaacatggggtattgagtataactctgtgtgaatagcgtaaaaatactcaccaacttttaataaggatgaaaaatgaatacagcagtaaaagctgcggttgctgccgcactggttatgggtgtttccagctttgccaatgctgcgggcagtaatactggtacggtgacttttaccggtactattgaagattcaccgtgttcaatcgtggttggcgacgaacaccagaccgttaacctgggccatatcggtaccggttctctgatgggcggtaaagaatcttcaaaagtcgatttccatatcggtctggaaaactgcgcattcaccactgagaaagaagcgtctaccgttttctctgccatcggtaacgaatccagcgctaatccgggcagcgttgcgctgatgcgtatcggcggcggcgaaatggcgggttccagcattgttatcggcaaccacctgggttccgcgatcaaattgggcgacgcttacagcgaaaacctgacgatgaacggcagcgttgcggcggcgaaacagactcttaacttcaaagcctgggtgaaaggcgattctgctgccaccactatcgataccggcgaattcagcagcaccgtaaacttcacgatcagctatctgtaagtgaaatatcatcctgcggcagtctgccgcaggatgatgctcaaagtaaaaaaatagattatatatttcagggatagattgtctgatggctcactataaaaaatttcgtctgagcacgcttgcggccgtggtgggtattgttctggctgtcggtccggaaaatagctacgcggaagcgcccattcaatttaatacccgatttcttgatgttaaagatgatgccagcctggatctctcccgtttttcccgtaaaggctacattatgccggggagctatcatctccaggtgctggtcaatcagagtcaaattgtccaggataatgttattacgtattccgttgataataacgatcctgataacacctatccctgtttatcgcctgaactggtctcgctgctggggttaaaacctgaaatagcagataaaatgatctggataaatgccggtcagtgtctgcaaccagatcaactggaagggatggaaacccaaacggatttaagccagtcaacgctgacggtgattattccgcaggcgtatctggaatacagcgatgaagagtgggatccactttcccgctgggatgaagggattcccggcgtattatttgactacaacgttaacagccagtggcgacatgctgaacatgatgacggcgatgaatatgacatcagcggcaacggcacggtgggtgccaacctcggcgcgtggcgtttgcgcgcggactggcaggctaactatcgtcacgaaaatgacagcgaagataaagacaactttggctccagttccgaacagaactgggactggaaccgctattacgcctggcgggcgatcccgcagctccgggcgcagctaacgctgggcgaaggatcgctggaatccgatattttcgacggctttaactatgttggcggcagccttatcaccgacgatcagatgttaccgcctaatctgcgcggctacgccccggatatatcaggcgtggcgcgcaccaacgccaaagtcaccgtgacccagcgcgggcgggtgatttatgagtcgcaggtcccggctgggccgtttcgcattcaggatattaatgaaacggtatccggcgatctacacgtcaaaattgaagaacaaagcggtcaggtgcaggaatatgacgtcagcaccgcctccattccgtttctgacccgtcccggccaggtgcgctacaagttggcagccgggcgaccgcaggactgggatcacaatatggaaggcggctttttcacctcagccgaagcctcctgggggatcgctaacggctggtcgctgtacggcggtgccatcggtgagcaggattatcaggcgctggcgttaggactggggcgcgatctggcgctgctgggcgcgttttccgtcgatgtcacccattcccgtgcgacgctgccagagggtagcgcctacggcgacggcaccattcagggtaactcgttccgtgccagctacgctaaagattttgatgatatagacagccgtctgacgtttgctggttatcgcttttccgaagaaaactacatgacgatggacgagtttatcgatacgcataatgacgataacgatcgtcagcgcaccggccacgataaagagatgtataccctgacgtacagccagaacttttcggcaataaacgtcaacgcctatatcaactacacccatcgcacctactggaatcaacctaaccaggacagctataacctgacgctgtcgcactatttcgatgtcggtgaggtgcgcgggatcagtctgtcggtgaacggttttcgcaacgaatatgacaatgagcgtgatgacggcgtgtacgtctcgctcagtattccgtggggcaacaaccgcacgctgagctacaacggctcctttagcgatgacaacaacagcaatcaggtcggctattacgagcgcattgacgatcgcaataactaccagatcaacgctggtcgcgcggataacggtgcgactctcgacggctactaccgttatcaagcgagctatgccgacattgacgtcagtgcgaactatcaggaaggcgactatacctccggcggactgaacatccagggcggcgcgacgctgactgctaaaggcggggcgttgcaccgcaccagcgtcaacggcggctcgcggctgctggtggatgtcggcgatgaagcgaacgtacccatctccggctacagcacgccggtatataccaacgcgtttggtaaagccgtcattgtcgacgtcaacgactactaccgcaaccaggtgaaaatcgacattacccagttgccggaagacgcggaagcaatcctctccatcgctcaggcgaccctgacggaaggggcgatcggttatcgccgcatggaggtgctcagcggtaaaaaagccatggccagtatccgcctgcgcgatggcggcacgccgcccttcggcgcagaggtttacaacagtcgccagcaacagttagggatcgtaggtgaagacggcagcgtttatctgatcggcattaaccccggcgagcggttgcaggtgacatgggaaggtaaaacgcagtgtgaagcgacgttgcccgatccgctgccgggcgatctgtttagcggcctgttgctgccgtgcatcggcgacgcttcatcacctgaggcaacgcagcccgaagagaaaccattactccagcttcatacgcagcggcggacgtcttcgacgcaacccgaagcgctctcttctcgttatccaacacattgattcaggaaaccgcattcatgatgtcattaaaacgttataacctggccgctgttttgctgcttttgctgggcggctacggtagcgcccaggccgccatcgcgcccgatcgcacccgcctggtgtttcgcggcgaagataaatcgataagcgtcgatctgaaaaacgccaacagcaaactgccctatctggcgcagtcctgggtggaagatgagaagggcgtcaaaatcacctcgcctttaatcgtcgtcccaccggtccagcgcattgagccgtcggcaatcggacaggtcaaaattcaggggatgccggcgctggcgtcgctcccccaggatcgggaaacccttttttattacaacgtgcgcgaaattccgccgcaaagcgacaagcccaatacgctgcaaatcgccctgcaaacgcgcatcaaagttttttaccgcccgcaggcgctatcgaaaatcgatatgcagcatccctggcaatacaagatcacccttcagcgtcagggcaatggctatcaggtgagcaacacaaccggctactacgtggtgttaagcaacgccagcaaccgcatggacggcacaccagccagaggctttagccctttagtgattgcaccaaaaagcaacgtgacgctgggaggggacgccagtgaattaggtcactcgcctgtgctgacttacgtcaacgattatggcgcgcggttaccgctgatttttaactgtactgacaacagttgtgcggtagatgaagcaaaaagcagaaagtcgtaaccgacaaggagacgcaagatgaggcaatggcggttacggctgggcacggtaacgtgtgcggccatgctgagtgcggtcagtatgccgctggcagcgggaagtaagacggtcaacatgacgctgacgatagtcgttaatgccgcgccgccctgtactgtgaccggcggtgaggtggaatttggcaatgtgttgacgacgaaagtggatggggtgaattaccggcaggcggtgggctatcgcctgagctgtaacggcagagtgagcgattacctgaagttacagattcaggggaatgcggtgactatcaatggcgagtcggtattgcaaaccgatgtcgatggattgggtatccgtctgcaaaccgccacggatggcgcgctgatttcacccggcaatacgcaatggttgtcatttcaatacagcggcggcagcggtccggccattgaggcgattcccgtcaaaaataatggcgtaacgttaacaggtggcgcgtttaacgcaggcgccacgttggtggtggattaccaatgaaaaaaatagttttgacgatgttaatggggggcagccttgccgcacaggcagccgataatcttaagtttcacggcacattaatttcaccgccgaattgtacgattaacaatgatcagacgatcgacgttaagttcggtaacctgctgattaataaaatagatggtacgcgttatgcgcagaatgttccgtatgagatcacctgtgattcaacggtgcgcgatgagacgatggcgatgaccctgacgctaagcggttccgtgagtgattttaatccggcggcggtaaacaccagcgtggcggggctggggattgaactcaggcagaacgaccaaccctttacgttggggtccaccattacggtgaatgaacaatcgatacctgttctgaaagccataccggttaaaaagagcggtgcttcgctgaaagaaggcggcttcgatgcgacggcaacattacaggtggattatcagtaatggctaaaagacaggcgttattacacggcgcggcctgcatcctctgtggggcgctgatattgccggtctcagcggcagataacctgcatttttccggtagcctggtggccagtccttgcacgctcacgatgcaggggacggggattgccgaagtcgatttttcgtcgcttgacagttctgatttcactcccgacggccagtctgctcgtaagcctttggtgtttgaactcacggattgcgattcggcgctgagtaacggggtgcaggtgactttcactggaaccgaagcgaccggaatgcgcggtatcctggccatcgatagctattcaggcgcttccgggatcgggattggtattgaaacgctatccggcgttcccgtgggcatgaacgataaagagggtgcgatatttacgctggtgacggggaaaaatacgctaaacctgaatgcctgggtacaacgtcttcccggcgaggacctgattccgggaaggttctctgcaagtgcgctagccacatttgagtatttataatgaaaataatacggactttatttttgctgctgattgccgtttatggcagttcggtagtggccaaacccatgctgaaagcgacgttttcaagcaccacgatgtattatggtattggccctaatagcgacaaatctattgtggcggaggtgacgatagcgactccggagggagtgtactatggctcctggaacctttcgggacatcgtaaaggagaaacgctaaccgcagactcctggtctgggccagaacctgcgccgaaggttgtattgaaggattttgataacactgtttcgcgatctgcgtgcaagaatcttccctcgaactggagggggtgtggttcttttaccctggagattacggtacaaagcgatgattatggttgcccctggctggcgtcgagccatatcgttgctaccacttttatcactaacgaaacgtattccccgccggatacgcgcagttcagtttgcccgaaagttcccgttgatacttttgatatctcctgggatgcgaacgtttcgaaacagaaaacaaccctcatgcttgatgccaccggtggcacggtgaatcgcacgttacatacctatttgatggaggggggaaaactgtgcgatggcagcaaatttgacaaccgtggcgcttattgccgttttgtctcatcgggtattacgctcaatgtgctgggctgcgaccagtcgagcgtcacgaccagcgccgttgatcatccgataaccgatgttgagcttcatgacattaatgtagcggtgaacacccgcaacattggctccgggcagttcacgtcgacctgtagcttccagtatattattgatgagctttaggggggctgggtgtttggcgaagattcacgctaacctggtatgaaccaaaaaaaaaccgggtggcggcttcgccttacccggcctacgttgtttctggacgttctcttttacagtttcgcaaacacccgacgcgcggcgtcaatagtattattaatgtcgtccatgctgtgtgcgaccgacataaagcccgcctcaaacgccgatggcgccagatatacgccttcctccagcatcaggtggaagaaacgcttaaagcgttccacgtcgcacgccatcacgtcctgatagcaggttacgctctcagcgtcggtgaagaaaatcccgaacatgccgccgacatggttgacgaccagtgggatccccgcctcctgcgccgcttcgcacagcccttccgccaggcgggtggtgagctcatccagcgtttcatgaatgccgggctgggcgacttcattcaggcaggcgaaaccggccgccatcgcaatcgggttgccggaaagggtgcccgcctggtaaaccgggcccgtcggcgccagcgcatccattacatcgcgacgaccgccaaacgcgcctaccggcatcccgccgccgatgattttacccagacaggtcaggtccggcacgacgccgtagtaatcctgggctccggccagcgctacgcgaaaaccggtcattacttcgtcgataatcagcagcgcgccgaactcatcgcacaaggcgcgcagacctggcagaaattccggcagcggcgggacgcagttcatattgcccgccacgggttcgacgatgatactggcgatttcctgcggatattgttcaaatgccgcgcgcactgacgtcagatcgttataagtgcaggtcagcgtatgtttcgcgaaatctgccggcacgcccggcgagttcggctgaccgagcgtcagcgcgccagaaccggctttgaccagcagacagtctgcgtggccgtggtagcagccttcgaatttgataatcttatcgcggccagtaaaaccacgcgccaggcgaatagcgctcatcgtcgcttcggtgccggagttcaccatgcgcaccatgtccatggtcggcaccaggttggtgaccagttccgccattttcacttccatttcggttggcgcgccgaagcttaaaccgcgctccgcagcttcgatcaccgcattgcggatagccggatggttatgccccagtaccattggtccccaggaaccgacatagtcgatatacgctttgccatcgacatcataaagataagcgccgtccgctttttcgataaacagcggggtgccgcccacgccagtgaaggcgcgaacaggggagttcacgccgccggggatcagctcgcgggccgcgctatagagattttcagacttactcatggaaagattcctggttcgtagaaaaagtgaatacccgctattctaagttattcagagaaggttatgaaagttttacgcatttgaaacaatacgatttgcaggggattttcgcggcgttggcgagtagaatgccgactttagatttgtattaccaattaatgatcttctgatgaaaacagacacttccacctttttagctcagcaaattgtgcgtttacggcgcagagatcagattcgccggttaatgcagcgggataaaacgccgctggccatcctgttcatggcggccgttgtcggcacgcttaccggactggttggcgtcgcctttgaaaaggcggtttcctgggtacaaaacatgcgcattggcgcgctggttcaggtcgcggaccatgcgtttttgctttggccgctggcctttatcctttcggcgttactggcgatggtcggctactttttggtgcgaaaatttgcgccggaagccggcggctcgggtatcccggaaattgaaggtgcgctggaggagttacgtccggtgcgctggtggcgcgtgttgccggtgaagtttatcggcgggatgggaacgttgggcgcaggaatggtattagggcgcgaagggccaacggtgcaaatcgggggcaacctggggcgcatggtgctggatgtttttcgtatgcgcagcgccgaagcgcggcatacgttgctggcgaccggcgcggcggcggggctctctgcggcgtttaacgcgccgctggcgggtatcctgtttattattgaagagatgcgcccgcagtttcgctacaacctgatttcgattaaagcggtgtttaccggcgtcatcatgtcgagcattgtgttccgcatatttaacggcgaagcgccgattattgaagtcggcaaactgtctgatgcgccggttaacacgctgtggttataccttatcctcggtattatttttggctgcgtcgggccggtatttaattcgctggtgctgcgtacccaggatatgtttcagcgctttcatggcggcgaaattaaaaaatgggtgcttatgggcggcgcgatcggcggcctgtgcggtattctggggttgattgagccggccgcggcaggcggcggatttaaccttattcctatcgccgcggcaggtaattttagcgtcgggctactgctgttcatctttattacccgggttgtcacgacgctgctttgcttttcttccggcgcgccggggggcattttcgccccgatgctggcgctgggaacgctgcttggtacggccttcggtatggcggcggcagtgcttttcccgcagtatcacctggaggccggtacctttgcgattgccgggatgggggcgctgatggcggcgtcggtgcgcgccccgttgacagggattgtgctggtgctggagatgaccgataactatcagctcattttgccaatgattatcacctgtcttggcgcgacactattagcccagtttttgggcgggaaaccgttatactcaaccatcctggcgcgcactctggcgaagcaggatgcggaacaggcggcgaaaaaccagaatgcgcctgcggacgagaatacttgaacgaattaccagggtattagataatgactgccaatattgggtgaaaatttatccaattaccgatgtcgtttggagcaaaatatgagtgatgacgtagcgctgccgctgcagtttaccgacgcagcagcgaataaagtaaaaagtcttatcgctgacgaagataacccgaatctgaaactgcgcgtgtatatcaccggcggtggttgcagcggcttccagtatggttttacctttgacgatcaggtgaacgaaggggatatgaccatcgaaaaacagggcgttggcctggtggttgacccgatgagtttgcagtatctggtgggtggttcggtagattataccgaaggtctggaaggttcccgcttcattgtaaccaacccgaatgcgaaaagtacctgcgggtgtggctcttccttcagcatttgattgctgttcgttgtgccggatggcgacgcgagcgtcttatccggcctacaggaaagatgttccaggcccgataagcgtagcgccatcgggcaaaacaatatcaacgtccgttttcatccagggcaaacgtcggcaatttcaaatgccagcgaatggccgccagccgaatgaacagcgtgaccaccatacccatcatgctggcgctttccagcggtactgaaaacgtataaaacgcggtggcgtgaacaatcccgccgataatacaggccgtggcatagatttcggtgcgtaggatcatggggatctcgcgtgccagaacatcgcgaataatcccgccgccgacgccggtaatcacgcccatacagacagccactaatggccccgtttcagcgaggaaggctttattcaccccaatgccgacaaacaccgccagcccgaccgcatccagtaccggcaacatccatttcggtagacgtcttggctggcgaaccagtaggatggtcagcatactggtgaccatggcgacgaccaggtcggtaggatctttaacccagaataccgggccgttatccagcgccatatcgcggattgtcccgccgccgacggcagtaacgacgccgagcaccaggacgccgaacgggtccatacgtaatttcccggccagcaacacgccagagatagcaaatacagccgtgcctacaatatccagccaatagacgagcattgtcgaatccccactgggagcctggtaagacaggctctaattcacctgtgaaagcgcattacagagttgttttgcggcgaggataatacgcgggcttgcgcgttcaaaccagtcgctgttaagcggaataaccggaatttttaacaggtttccccagtattgttcaattttgagaatttcgcccgcttttccggccacgataatggcctggggatgccttgccagcacctgctcacggctgacttgcggccacggcacgcggctgtcagcaaagacgttttctccgccgcaggtcgtcaaaacctgatgttgaatagaccctttaccactggtaaacagaggattcatgccaaactgaagaaagacgcgctttttagctttaccggcatactcggcgttgagcgcggcgtactcgtttagcaatgtctgcgctgcctgctgagccttttccggctgcgggctccaggcggccagttgacggagcgtgtcggcgatctgttcgatggttaccgcgtccacccacatgaccttaatacctaatgacgtcagttggtttacctggcgttccgcattaccgccgcgccaggcgacgaccagatccggcttcagcgccacaatgcgttccagattcattccctgccaggtagagacttgttctattttttgcgcttcgggcgggtagtcggaatagctgctgacgccaacgggcgtaatcccggcggcaaaagcgagctccgtattggcgggagagagggtaatgacgcgcggcgcagcgtaaagccacaccgggagcgtaagcagcagggcgaccagcgccctgaacatttgcttagccatgcgccagtttctgtaccagcgtttcgaccatcagagtcgactgtttcgccgccaccgcgaggaattcgtcaaagctgaggtgcgattgctgatcggccacgtcagaaatagcgcgaaccaccacgaacggcacgttgaagttatggcagacgtgggcgatagcggtggcttccatctctacggcgaccgcgtcggggaagttatgccggattttcgccagcccgacggaaccgttaataaacgcgtcgccgctaacaataaggccgcgtaccgcgttcagattcagctctctgatgcaggattccgcggcggcgatcagtttgtcatcggccttaaatccggccggacagcccggtaattgcccgtattcatagccgaaagcggtcacatcagcgtcgtggtaacgcgcttcgtcagagacgacgatatcgccgaccttcagcgtggacgccagaccgcctgcggaaccggtattgatgatcacgtccggcttgcagtgctccagaagcaacgttgcgcccagcgccgccgcgactttaccgataccggatttcagcaacgccacttcggtgccgttcaactggccagtgtaaatttcgcagccgcccagcgtaatcgtctgacggttgtcaattttgtcacgcagcagcgtaacttcttcttccattgcgccaatgatgccgattttcatagatttactcgcgataagtcagttttgggggcatagtttatcatgcgcttatggggaagcgcatttctcaggcggggagaggatatggcatcgatcgatttccgaaataaaattaactggcatcgtcgttatcgttcaccgcagggtgtaaagacggagcatgagatcctgcggatttttgaaagcgatcgcgggcggattatcaactctccggctatacgccgtttgcagcaaaaaacgcaggttttcccgctggagcgcaatgccgcggtgcgtactcgcctgacgcattcgatggaggtgcagcaggtagggcgttatatcgcgaaagagattttaagccgtctgaaagagcaagaccgactggaggagtacggcctggacgcgctgaccggtccctttgaaagtattgtggaaatggcctgcctgatgcacgacatcggtaatccgccgttcggtcattttggcgaggcggcgatcaatgactggtttcgtcagcggctgcatccggaagatgcggaaagtcagccgctcacgcatgatcgctgtgtggtttcctcgctacggttacaggaaggcgaagaaaatctgaacgatattcgccgcaaggtacgtcaggatatctgccattttgaaggcaatgcacagggaattcgtctggtacatacgctcatgcggatgaatcttacctgggcgcaggtcggcggaattttaaaatatacccgtccggcatggtggcgagggccggtgccggattcccatcgctatttaatgaagaaaccgggctattatctttctgaagagaagtatattgcgaggttacgtaaagaactgcagttagcgccttacagtcgctttccattaacgtggattatggaagccgcagatgatatttcttattgtgtcgccgatcttgaagacgcggtagagaaaagaatctttagcgttgagcagctttatcaccatttatatcacgcgtggtgccaccatgagaaggattcgctgtttgagctggtggtaggaaatgcgtgggaaaaatcacgcgccaatacattaagccgcagtaccgaagatcagttttttatgtatttacgcgtaaatacattaaataaactggtgccctatgccgctcagcgttttattgataatttgccgcagatttttgccggtaccttcaatcaggcgttactggaagatgccagcggttttagccgcctgcttgaactctataagaatgtggcggttgagcatgtgtttagccatccggatgtagaacagcttgaactacagggataccgggtgatcagcgggttattagatatctatcagccgctattaagcttgtcgcttaacgactttcgcgagctggtggaaaaagaacggttgaaacgcttccccatagaatcgcgcttatttcagaaactttctacgcgccatcgtttggcctacgtggaagtcgtcagtaaattacccacggattcggcggagtacccggtactggaatattattatcgctgtcggttgattcaggattatatcagcgggatgactgacctttacgcatgggatgaatatcggcgtttgatggcggtcgaacagtaaatggacttttgtaaagatggacaataaatttttactttttccagaaactttattccggaacttcgcgttataaaatgaatctgacgtacacagcaattttgcgttacctgttaatcgagattgaaacacatgaaaaaaaccacattagcaatgagtgcactggctctgagtttaggtttggcattgtcgcctctgtctgccacggcggctgaaacgtcctcttcagcaatgactgcccagcagatgccaagcctggcaccgatgctcgaaaaagtgatgccatcggtggtcagtattaatgttgaaggtagcaccacggtgaatacgccgcgtatgccgcgtaatttccagcagttctttggcgatgactccccgttctgccaggacggttctccgttccagaattctccgttctgccagggcggcggtaacggcggcaacggcggtcaacaacagaaattcatggcgctgggctccggcgtaattattgacgccgcgaagggctacgtcgtcaccaacaaccacgtggttgataacgccagcgtgattaaagtacagcttagcgatgggcgtaaattcgatgctaaagtggtgggcaaagatccgcgttctgatatcgcgctgattcaaattcagaatccgaagaacctgacggcgattaagctggcggactccgacgcgctgcgcgtgggggattataccgtcgctattggtaacccgtttggtctgggcgaaacggtgacgtcaggtatcgtttcggcgctggggcgtagcggcctgaacgtagaaaattacgagaactttattcagaccgacgccgcgattaaccgtggtaactccggcggcgcgctggtgaacctgaacggtgagctgatcggtattaacaccgcgattctggcgccggacggcggcaacatcggtatcggcttcgctatccccagtaacatggtgaaaaacctgacgtcgcagatggtggaatacggccaggtgaaacgcggcgaactggggatcatggggactgagctgaattccgaattggcgaaagcgatgaaagtcgacgcccagcgaggcgcgttcgtcagccaggtgatgccgaattcgtccgcggcgaaagcgggtatcaaagccggggatgtcattacctcgctgaacggtaaaccgatcagcagctttgcggcgctgcgcgctcaggtcggcactatgccggtcggcagcaaaatcagcctcggtctgctgcgtgaaggtaaagcgattacggtgaatctggaactgcagcagagcagccagagtcaggttgattccagcaccatcttcagcgggattgaaggcgctgaaatgagcaataaaggccaggataaaggcgttgtggtgagcagcgtgaaagcgaactcacccgccgcgcaaattggcctcaaaaaaggcgatgtgattatcggcgctaaccagcagccggtgaaaaatatcgccgagctgcgtaagattctcgacagcaagccgtcggttctggcgctgaatattcagcgtggtgatagttctatttatttgctgatgcagtaatcacctttgtcccccttccgccatggaagggggcaacacttttctgtgaaaccccccacaactccatacttatttgcaccgttttgtgcatttgcacaatgtcgagacctgtcatcttccttatgcttgtgctctgctcacaggagggatttatggctggctggcatcttgataccaaaatggcgcaggatatcgtggcgcgcactatgcgcatcatcgataccaatatcaacgtaatggatgcccgcgggcgcattatcggcagcggcgatcgggaacgtattggtgaattgcacgaaggcgcgctgttagtgctgtcgcagggccgggttgtggatatcgacgacgccgtggcgcgacacctgcacggggtgcgtcaggggattaatcttcccttacgtcttgagggcgaaattgtcggcgtgatcggcctcaccggcgaaccagagcacctgcgtaaatatggcgaactggtgtgtatgactgccgaaatgatgctggagcagtcgcggttaatgcaccttttggcgcaggatagccgtttgcgcgaagagttggtgatgaacctgattcaggccgaagaaaatacgccggcgctggtggaatgggcgcagcgtttggggatcgatttgaaccagccgcgtgtggcggcggtggtggaagtcgacagcggccagcttggcgtcgatagcgcaatggcggaacttcagcagttgcagaatgcgcttaccacgccggagcgtaacaacctgatagccattgtttctctcaccgagatggtggtactcaaacccgccttaaactcgtttggtcgttgggatgctgaagatcatcgtaagcgcgtagagcagcttatctcgcgcatgaaagagaatggtcagctacgttttcgcgtggcgctgggcaattactttaccgggccgggcagtattgcacgctcataccgcacggcgcgcaccacgatgatggtcggcaaacagcgaatgccagagagccgcagctatttttatcaggatttgatgctgccggtcctgttagatagcctgcgtggcggctggcaggccaatgagctggcgcgcccgctggtaaaactcaaagcgatggataacaacgggttattacgtcggacgctgacggcgtggtttcgccataatgtccagccgctggcgacctctaaggcgctgtttattcatcgtaacacgctggaatatcggctaaatcgtatttcggaactgaccgggctggatttgggaaattttgacgatcggctgttgctgtatgtggcgctacaactggatgaacagcgttaagcccggcggcgctacgcttatcaggcctacggggatatatctgtaggccggataaggcgtaacacgtcgccatccggcaacacacagcttacttacgggtaagcttgtccagatcggcttcgatttcactgatcttattcgcgacgacgctttccaggtggcgcaagtcgtcgaggatcttacgtttgagatcgagttctgagcggtcgcgctggcagatttggtccagctcgtcaatcacatagcgtaggttagggctaatctcctgtacctctttataaccctgaccgatgccatcggccaccaccgttttacgctggcgtggatacttaaacttcacgcttttagcaaagaattcacctctatccttttgaaaatagattttcaggatatcgttattggcttcttgccgcaggctgtaacgatcgatttcctcaggattggtaatgcccagactttttagattgtcatacatagcggtatccttcatcacactataacttttgaataattaacgaaaaattggtttttcgccaccagtgtatacaaaaaaagcgcggttgatcgcagaagacgtctcggcaacgtcatgagcaaaagggcggcggttattgatagcttaagtaattcaacgcgatattccgtttatagagaaagcgtttgaagtcagtgtgggaaattgaccggaggcagtggtcgataaccttgagaggcggagtctatgtccggaacgtataatgctactattctccgggtggtggtttccgcctggataggaaactccattgaatattatgattttctattatacggcctggcaagcgcgctggtatttggcccgcttttttttcctggcgccagcccattgactgcaacgttatcttcttttgccagtttcggcgtgggatttatctcccgaccgctgggcgcgctattttttggcaacaggggagatacgcttgggcgtaaaaacacgttattaattacgttaggggggatgggcgcggtcacgtttctcatcggttgcctgccttcttacgccagtattggcgcgctggcgcctgctttactggttattctgcgttttctacagggatttatggttggaggcgaatggggaggcgccatgttgatggtcgtggaatatgctgctggaaagcaccgggggcggttaagcgcgctatcgcaaacaggaggactcacgggacaattattggcgacaggcgtatttatagtcgtgacccaattaccgcaggaggcgttgttatcgtggggatggcgtattccttttctgctcagtgcgcttttggtgttgcctggattatatatgcgtcatcgtctggatgagacgcctgtcttccgtgcgtttaaaaagcagcaggccattaatcataggcagcaaagagaagaaaggccggtggtcaaagtagtacgagaacaatggcgcagcattttgctgattataattctgcgttttgcggaaagcgttcccttttttcttgctaccgtcttcgcggtttcctgggcgacgacgcagcttgggattgccagcctgactattctgtacattgtaatgttcacctgtctgctggcgtatcccatgcacgtgctatttggcatcatgtcggatcggcgtggctgccgtcaggtgtatattttcggcgcgctttttgtcgcggcaatggcttttccctttttctggctgctggaaagccgttcgctcatactgatgacaatgggctacgttctgcttattaacattggtcataattcactgaatgccgtgcaaccttcttttttcgccggactgtttcatccgcctgtacgctacagcggttcatcaattggcgctcagttgggggcggttgtggcagggggattcacgccgtttatcgctaaagcgttaagcgcagtctatgataacagttgggcgttggttgccggttatgtcgttttgactgcgttggcttcggcgtttgcggcaaagattgcgccggaaaccgtgttaccgcattcgccgtaatgcaaaggggggctgtcgcccccgcttttcactcgcttaatcaatagtgcgcaataattcgttaatgcccactttaccacgcgttttggcgtcgacttttttcacgatcaccgcgcagtacaggctgtacttaccgtcttttgacggcaggttgccggaaacgaccacggagcccgccggtacgcggccatagtgaacttcaccggtttcgcgatcgtagattttggtactctggccgaggtatacgcccatggaaatgacggaaccttcttcgacaatgacgccttccacgacctcagaacgcgcgccaataaagcagttgtcttcaatgatggttgggttagcctgcagcggctccagtacgccgccgatacccacgccgccggaaaggtgaacatttttaccaatctgcgcgcaggaacccaccgtcgcccaggtgtcaaccatggtgccttcgtcaacgtaggcgccgatgttaacgtaagacggcatcagcacggtgttgcgggcgataaatgcgccctgacgaacggccgcaggcggaacgacgcggaagccttctttctgaaaacgcgcttcgtcgtaatcagcgaatttcatcgggactttatcgaagtagcggctttccgcaccgtcgataacctggttatcgttaatacggaaagagagcagaaccgctttcttcaaccactggtgagtgacccactgaccgtcgattttttctgcgacacgcagcgcgccggaatcaagtagagaaatgacctggtttactgcctctcgggtcacggtatctacattagccggcgtaatatcggcgcggcgctcaaaagcggtctcaataacgttctgtaactgctgcattgttaaactctttcatataaataaacacactaccctttatcgtttggattgagggccgctgtcaaccgttgttgcacctcaagttgcagcacattattaagtgcgcgccgatccgctgtggcgattatgaataaatcttctactcgttcaccaatggttgtaattcgggcgccatgaagcgaaattcccagatcggcaaaaatttgtccgaccctggccagcagaccaggttgatcgagcgcgatcaattccatgaatgattttctgtcggtatgggtgggcagaaaattgacttccgtttcgaccgtaaagtgccgtaactttgccggttgccgacgcggctgcggcggctgccagctacgctgcgtaatggtttgttcaagaccggtgcgaataacgtcatggcgatccgccgccagcgggctgccgtctggttccagaacaataaacgtatccattgccatgccgtcgcgagtggtaaagatctgcgcgtcatggacgcttaaattacgcctgtccagctcggcgcagacggcggcaaacagatagggtctgtccggactccagataaaaatttcggttccaccgcgcgtggcctgcggactgagcaacactaacggttggcgcagatcgtgctgcaataaatggcgtgcgtgccaggcgagctgatttggactatgacgaacaaaatagttagcgcgacagcgggtccagattttgtgcagcgcggcttcatcaatattgtccattcgcagcagcgccagcgcctgaagctgatggtgacgcacgcgctcacgcatatccggcgtattttgcattccacgcctgagctgtttttcagtggcgaagtacagctcgcgcagcaggctctgtttccagctattccacaaggtttcgttggtcgcgcagatgtccgcgacggtcaggcagaccagaaaacgcagccgtgtttcggtttgcacctcttcggcaaactgcttgatgacttccggatcctggatgtcgcggcgctgggcggtgactgacattagcaggtgttggcgcaccagccacgcgaccagttgcgtttcgcgtgagttcaaaccgtgcagttcggcgaaggtgagtacatcctgcgcgcccagtacggaatggtcgccgccgcgtcctttcgcaatatcgtggaacagcgcggcgatcaggatcagttccggatggggaagccgcggccagagatcgacgcatagcggatggcgctggcgcgtctcttctttcgcaaagctctccagtttgagcattacgcggatggtgtgttcatccaccgtgtatgcgtggaacaggtcaaactgcatttgtccgacgatgtgcgaccactgcggcatataagcccacagtacgctgtggcgatgcatgggcagcaggccgcggctgaccgcgccgggatggcgcagcatactcagaaacagagtgcgcgcctccgggatgtaacacagcggttggctcaggtggcggcgggcgtggcgcaagtggcgtaacgtcgtagagtagatgccggtgatcgcgctattgcgcaccatcatataaaacatgcgcaggatcgcttgcggttcgcggataaacagcgtgtcgtcacgcagatcaataagcgtgccgcgcagttgaaactcatcgtcaacaggacgtggtttttcatccgcaggtagcgccagaatcgcctcgtcaaatagctgaagcagcatctgattaagttcgctcacccgacgcgtaacccggaagtagtctttcatcatccgctcaaccggatcattgccctcgccgctgtagttaaggcgttgagcgacgcttaactggcggtcgaacagcaggcggttatcgtagcggctgaccaccagatgtagcgcaaagcgaatgcgccacaggatatgcaggcactcgttgagctccgcgcgctcagcgggggttaaaaagccgaatcccaccatctcatcgagcgaggtagcgccgaagtgacgtcgggcgacccactgtaacgtatggatatcgcgcaggccgccggggctgcttttaatatccggctccagattatagctggtaccgtgatagcgctggtggcgctggttctgctcttctactttggcggcgtaaaatttgtcggacggccaaaaaccttcgctgaaaatatgtttttgcagtgccagaaacagagcgacatcaccgatcagcaggcgcgtttcgatgaggtttgtcgcaacggttaaatcagacagaccttccagcagacactcttccagcgtacgtacgctatgcccgacatccagcttgacgtcccataataaagtcagcagctcgccgaccttttgcgcctgttcatcgggcagctttttgcggcttaaaatgagcagatcaatatcggaaagcggatgcagttcgccgcgtccatagccgccgacagcgaccagcgccagatcggcaatctgaccgaaaccggcctcaatccacaggcgttgcaataactggtcgataaattcggttcgggcttcaataagctgttcagcacaaatgccgctgtcaaatgcctctcccagccagtgttgaaagatgtcgatgcgggctttgataccggcgacggtcagttcagcgcgcggccagacgccagggttttgcggctggtcagggagggtggggagtgcggtattcgcgtgctgttcaggaagagtattcatatgcgccacccattaaaaagccggataatggcgtgaacgccttatccggcctacgtatttatcttcatccttcaagttgcttctacgttggctgcgctcgttcactccagtcacgtacttatgtacgctcctgaagattcactctcttgccgccttgaggcaactcgaatgattttgagtaaaggtgtaatttgtaggcctgataagatgcgaaggcatcgccatcaggcaaaacattattcgtcgtgtgtgatgatcgccgggatggtgtcatctttacgcagcgtcagaatttcacagccgttttccgttaccacaatagtatgctcgtactgagcagacaagctgcgatctttggttttcaccgtccagccgtctttcatggtgcggatacggtaatccccggcgttcagcatcggttcaatggtaaaggtcatgccaggctgcaacacgacgccgccatcgtctgcatcataatgcagcacctgcggttcttcatggaagccgcgaccaataccgtgtccgcagtattcacgtaccacggagaaaccttcgccttcggcatatttctggatggcggcgccaatggtgcgcaggcggatgcccggtttcaccattttgatgcccagatacaggctctcttgcgtgacgcggcacagacgctcgccgagaatggtcggtttgccgacgataaacatcttcgaggtatcgccgtggaattcatctttaatcacggtcacgtcgatgttgacgatatcaccatctttcagatgtttagcgtcatccggaatgccgtggcacaccacttcattaatagagatacagacggatttcggataaccgtgatagccgaggcaggcggagatcgcgtgttgttcgttaacgatgtaatcgttacagatacggtccagttcgccggtggtgacgcccggtttgatatacggttcgatcatttccagcacttcggctgccagacggcccgcgacgcgcattttttcgatgtcttcagatgtcttgatagagatagccatgaattctgtccatcagtgccgatgatttcggcaataattgtgtaagtgctgacaatggtatcagtcaggggtgtaccctgccaaattgagaatcattctgaacttcgcctttcgtgccacaggtgcgttggcgacattttttcaccccagtcactgactggccgtaagctcccggggatgcaaaaatttgctgcctgcctgtaacacgaaattcatcgttcaattcagcactgagtgccaacaattattggtgtcggtggcgtatttgtggtataaagcgcgccggacttccgatccattcgaagactacacacgatggacgggagcgacaaatctcactttgtgtaacaacacacacgtatcggcacatattccggggtgccctttggggtcggtaatatgggatacgtggaggcataaccccaacttaatctatagaggttttaaatcatggcaactgtttccatgcgcgacatgctcaaggctggtgttcactttggtcaccagacccgttactggaacccgaaaatgaagcctttcatcttcggcgcgcgtaacaaagttcacatcatcaaccttgagaaaactgtaccgatgttcaacgaagctctggctgaactgaacaagatctctgctcgtaaaggtaaaatccttttcgttggtactaaacgcgctgcaagcgaagcggtgaaagaagctgctaacagctgcgaccagttcttcgtgaaccatcgctggctgggcggtatgctgactaactggaaaacagttcgtcagtccatcaaacgtctgaaagacctggaaactcagtctcaggacggtactttcgaaaagctgaccaagaaagaagcgctgatgcgtactcgtgagcttgagaaactggaaaacagcctgggcggtatcaaagacatgggcggtctgccggacgctctgttcgttatcgatgctgaccacgagcacattgctatcaaagaagcgaacaacctgggtatcccggtatttgctatcgttgataccaactctgatccggatggcgttgacttcgttatcccgggtaacgatgacgcaatccgtgctgttagcctgtacctgggcgctgtcgctgcaaccgttcgtgaaggccgttctcaggatctggcttcccaggcggaagaaagcttcgtagaagccgagtaataaggcttgataactccctaaaatagttcgagttgcaggaaggcggcaagctcgagaattcccgggagcttacatcagtaagtgaccgggatgagcgagtgaaggcaacgcgcctgcggctcgaaatatgaaggggagagcccttatagaccaggtagtatcacgtttggttagggggcctgtatatggccccctttttcacttttatatctgtgcggtttgatgccgggcagatcaaatctttcgaggattttagaatggctgaaataaccgcatccctggtaaaagagctgcgtgagcgtaccggcgcaggcatgatggattgcaaaaaagcgctgactgaagcgaatagcgacattgagctggcaatcgaaaacatgcgtaagtccggcgctatcaaagcggcgaaaaaagcaggcaacgtggctgctgacggcgtaatcaaaaccaaaatcgacggcaacgtcgctttcattctggaagttaactgccagactgacttcgtggctaaagatgctggcttccaggcatttgctgacaaagtgctggacgccgctgttgctggcaaaatcactgacgtagaagttctgaaagcacagttcgaagaagagcgcgttgctctggtagcgaaaattggcgagaacatcaacattcgtcgcgtcgcttccctggaaggcgacgttctgggttcttaccagcacggtgcgcgcatcggcgttctggttgccgctaaaggcgctgacgaagagctggttaaacagctggcgatgcacgttgcggcaagcaagccggaattcgttaagccggaagacgtgtctgctgacgtggtagagaaagagtaccaggtacagctggacatcgcgatgcagtccggtaagccgaaagaaatcgcagagaaaatggttgaaggccgcatgaagaaattcaccggcgaagtttctctgactggtcagcctttcgtcatggaaccgagcaaatctgttggccaactgctgaaagagcacaacgctgacgtgactggcttcatccgctttgaagtgggcgaaggcattgagaaagtcgagactgactttgcagcagaagttgctgcgatgtctaagcagtcctgattttcctgaggagccgcctgagggcggcttctttttgcgcctctcttgtaaaatcagccgacgcctggcgtctgcgctgaaatgcgacgtacaatgtcgccggaattaactcatatcaatcgttgacagtctcaggaaagaaacatggctaccaatgcaaaacccgtctataaacgcattctgcttaaattaagcggcgaagctctgcagggtacggaaggcttcggtattgatgcaagcatactggatcgtatggctcaggagatcaaagaactggttgaactgggtattcaggttggtgtggtgattggcggtggtaacctgttccgtggcgcgggtctggcaaaagcggggatgaaccgcgttgtgggcgaccacatgggcatgttggccaccgtcatgaacggcctggcaatgcgtgatgcgcttcaccgcgcctatgtgaacgcccgcctgatgtcggcaattcctttaaacggcgtgtgcgacaactacagttgggccgaggcgattagcctgctgcgtaataaccgtgttgtgattctgtctgcaggtacgggtaacccgttcttcactaccgactctgcggcttgtctgcgcgggatcgaaattgaagcggatgtcgtactgaaagcgaccaaagtggatggcgtattcactgccgatccggcaaaagatccttccgcgaccatgtacgatcagctgacctacagcgaagtgctggataaagagctgaaagtgatggatctggcggcgttcacgctggctcgtgaccacaaactgccgattcgtgttttcaacatgaacaaaccgggcgcgctgcgtcgtgtggtgatgggcgaaaaagaagggacgttaatcacggaataattcccgtgagcgccaaatacgggtaagattctgttctattgacgggtcttattacctggcagaaattaaacgagactatacttagcacatctttatattgtgtgaccgtctggtctgactgagactagttttcaaggattcgtaacgtgattagcgatatcagaaaagatgctgaagtacgcatggaaaaatgcgttgaagcgttcaaaacccaaatcagcaaagtgcgcacgggtcgtgcttctcccagcctgctggatggtattgtcgtagaatactatggcactccgaccccgctgcgccagttggcaagcgtaacggtagaagactcccgtaccttaaaaattaacgtgtttgaccgttctatggggccagccgttgaaaaagcgatcatggcgtcagacctcggtttgaatccaagctctgcgggcaccgacattcgcgttccgctgccgccgctgaccgaagaacgtcgtaaagatctgacgaaaattgtccgtggcgaagcggagcaggcgcgtgtcgccgttcgtaacgtccgtcgtgatgcgaacgataaagtaaaagctctgctgaaagataaagcgatcagtgaagatgacgatcgtcgctctcaggaagaagtacagaaaatgaccgacgcggcaattaagaaagttgatgcggcgttggcagataaagaagcagaactgatgcagttctgattgatctgtacgcagatataaactcattccaccgctaacctggcggatgagtggtgtacaaagcgccgcgcagaagacattatcaggtctcctgtgcggcgttttgctttttattccgtttcaacacttctggacgtttcatgaagcaattaaccattctgggctcgaccggctctattggttgcagcacactggacgtggtgcgccataatcctgatagcttccgcgttatcgcgctggtggcgggtaaaaatgtcgcccgcatggcggagcagtgcctggagttctcgccgcgttatgccgtgatggacgatacgtcgagcgcagaacagctcaaaataatgcttcagcagcatggcagccgcaccgaggttctgagcggtcagcaggctgcctgtgagatggcggcgcttgatgaggtcgggcatgtgatggcggccattgtgggcgcggctggtttactgccgaccctggcggcgattcgcgcagggaagacgattctgctggcgaataaagaatcgctggtgacctgcgggcggctgtttatggacgaagtaaaacgcagcaacgcccggcttttacccgtcgatagcgaacataacgcgatttttcagagtttgccgcaatctattcagcataatctgggatacgctgaccttgagcaaaatggcgtaacgtcgattttgcttaccgggtctggtggcccgtttcgtgaaacgcccatgtgcgatctggcagcgatgacgccggatcaggcatgtcgtcatccgaactggtcgatggggcgaaaaatctccgtcgactccgccaccatgatgaataaaggtctggaatacattgaagcgcgttggttatttaatgccagcgcacgtcagatggaagtgttgatccatccgcaatcggtcattcattcgatggtgcgttatcaggacggcagcgtcctggcgcagcttggagaacctgacatgcgtacgcctattgcgcatacgatggcatggccgaatcgcgtcacgtccggcgcgcagccgctcgatttttgcaaactcagcgcgctgacgtttagcgcgccagattatcagcgttatccttgcctgaagctggcgatggaggcgtttgagcaaggtcaggcggcaacgacggcgctcaatgcggcaaacgaaatcaccgttgccgcgtttctggcgcaacagattcgttttaccgatatcgccgggctcaatttagcggtgctggagaggatggatttacaggaaccggcaagcgttgaggacgtattgcaggttgacgccatcgcgcgtgaagtagccagaaaacaagtgatacggctctcacgctgacgattatcccgcgacagaagatcgtgctatttgttagcgttgggcttcggtgatatagtctgcgccacctgatcgcaggtttttggcttttttcggtcaggttagccgtggttttacacggcttttttgtggatacacaaaatcattcaggacgcatcgggacggcaggcgagtacgttcccggcgtgcgcagacagcgcacgacaggggcgatgacgcgcggtcatccgcgaagcgaaccgaagagaatgtgtataaaggcttcagtattcctgagtaccgctaaatcctttcagggacaaaaaacgcgttatgttgtctgcaactcaaccagtaagcgaaaatttgccagcgcatggctgccgtcatgttgcaataattatggatggcaatggtcgctgggcgaaaaagcaagggaagatccgggcctttgggcataaagccggggcgaagtccgtccggcgagcggtctcttttgctgccaataacggtattgatgcgttaacgctgtatgcctttagtagtgaaaactggaaccgaccggcgcaggaagtgagcgcgttaatggagctgtttgtgtgggcgctggatagcgaagtcaaaagcctgcaccgccataacgttcgcctgcgtattatcggcgatatcagtcgattcaactcacgtttacaagaacgtattcgcaaatcagaagcgcttaccgcccataatacgggtctaacgctgaatatcgctgcgaattacggcggacgttgggatattgtccagggagtccgacaactggcggaacaggtgcaggctggagtgctgcgccccgatcagattgatgaagagagactaggccagcaaatctgtatgcatgagctggcgcctgtggatttagtaattaggactgggggagagcatcgcattagtaactttttgctttggcaaattgcctatgccgaactttactttacggatgttctttggcccgatttcgatgaacaagactttgaaggtgcgctgcatgcctttgctaatcgagagcgtcgtttcggcggtaccgagcctggtgatgacaaagcctgatgggggttgcttttgctgaagtatcgcctgatttctgcttttgtgttaatacccgcggtcatcgctgcgctttttttattgccgccggtggggttcgccattattacgctggttgtctgtatgctggccgcgtgggaatggggacagttaagcggtttcgccgcgcgttcacagcgggtttggctggcggtgctgtgtggtctgttattggcgctgatgctatttttgttgcctgagtatcatcacaacattcgtcaaccgctggttgagatgtcgctttgggcatcgttaggatggtgggttgtcgcgctactgctggtgctattttatcccggttcggcggcaatctggcgcaactcaaaaacattgcgtctcattttcggtttgttaactattgtgccatttttctggggcatgctggcgctgcgcgcctggcactatgacgagaatcattacagtggcgcaatatggctactctatgtcatgatcctggtctggggagcggactctggcgcgtatatgtttggtaaattatttggcaaacataagctggcgccgaaggtttccccgggtaaaacctggcaagggtttatcggcgggcttgctacggctgccgtgatctcatggggctacggtatgtgggcgaatctgaatgttgcgcctgttatcttgctgatttgctctgtggtggcggctctggcttctgtactgggcgacctcaccgagagtatgtttaagcgcgaagcaggaattaaggatagcggccacttgattccaggccatggcggcattctggaccgaattgacagtctgacggctgccgtaccggtctttgcttgcctgttgttactggtgttcaggacgctctaacggaaggttttatgctgagtattctctggaatctggctgcattcatcatcgcactgggcgtgctgatcactgtgcatgaatttggtcatttctgggttgcccggcgctgcggtgtgcgagttgagcgcttttccatcggttttggcaaagcgctctggcgtcgtaccgatcggtacggcaccgagtatgtcatcgccctgatcccgctgggcggctacgtcaaaatgctggatgagcgcgccgaaccggtagcgccggaattgcgtcgtcacgccttcaataacaaaacggtgggccagcgcgccgcaattattgccgcaggtccggttgcgaacttcatttttgctatctttgcttactggctggtctttatcatcggcgtccctggcgttcgtccggtcattggcgaaataacgcccaactcgattgctgcgcaggcgcaaattgcgcctggtacggaacttaaagccgttgatggtatcgaaacccctgattgggatgccgtgcgtttacaactggtgtccaaaattggcgatcagcagacgacggtgagcgtcgcgccgtttggtagcgaccagcggcaggataaaacgcttgatttacgtcactgggcatttgagcctgataagcaagatcctgtatcttctttagggattcggccccgcgggccacagattgaaccggtactgtcagaagtgcaggcgaattccgcagccagtaaagcgggtttgcaagcaggcgacaggatcgttaaagtcgatggtcagccgttaacgcagtggatgaaattcgtgacgtttgtacgcgataatcccggtaagccgttagcgttagagattgaaaggcaggggagcgccttgtcgttgacgttaacgccggatacgaaatcggttaacggaaaggcggaagggtttgcaggcgtggtgcctaaaattattcctctgccggaagagtacaagactatacgccagtatgggccttttagcgccatcctcgaagccacggataagacgtggcagttgatgaagctgacggtcagtatgctgggtaaattgataaccggtgatgtgaaactgaacaacctcagtgggccgatttctatcgctcagggggctgggatgtcagcggagttcggggtgatttattacctgatgttccttgcgctaatcagcgtgaacttagggataattaacctgtttccgctgcccgttcttgacggggggcatctgctgttcctggcgattgaaaagcttaagggcgggccggtatccgagcgggttcaagactttagttatcgcattggctcgattttgctggtgttgttaatggggcttgcacttttcaatgatttctctcggttgtaagagagttagttaggaagaacgcataataacgatggcgatgaaaaagttgctcatagcgtcgctgctgttcagcagcgccaccgtatacggtgctgaagggttcgtagtgaaggacattcatttcgaaggcctgcagcgagtcgccgttggtgcggctctcctcagtatgccggtgcgcacaggcgacacggttaatgatgaagatatcagtaacaccattcgcgctctgttcgccaccggcaactttgaggacgtccgcgtcctgcgcgatggtaatacccttctggttcaggtaaaagaacgtccgaccattgccagcatcactttctccgggaacaagtcggtgaaagatgacatgctcaagcaaaacctcgaagcgtctggcgtacgtgttggcgagtctctggatcgcaccacgttgtctgatatcgaaaaaggtctggaagacttttactatagcgtaggtaaatacagcgccagcgttaaggcggtcgtcacgccgctaccgcgcaaccgtgttgatcttaaactggtgttccaggagggcgtatcggcgaagatccaacagatcaacatcgtcggtaaccatgcctttagcaccgaagaactcatttctcatttccagttgcgtgacgaagtgccgtggtggaacgtcgtcggcgatcgtaaataccagaaacagaagctggcgggcgaccttgaaaccttgcgcagctactatctggatcgcggctacgcgcgtttcaatattgactccacgcaagtgagtctgacgccggataagaaagggatctacatcaccgtcaatatcaccgaaggcgatcagtacaagctttccggggttcaggtgagcggtaacctggccggacattccgctgaaattgagaacctgacgaaaattgaaccgggcgagctctataacggcaccaaagtgaccaaaatggaagatgacatcaaaaagcttctgggtcgctatggttacgcctatccgcgcgtgcagtcacagcctgaaattaacgatgctgacaaaaccgtaaaactgcgcgtaaacgtcgatgcgggcaaccgtttctacgtgcgtaagatccgctttgaaggcaacgacacctcaaaagattccgttctgcgccgtgaaatgcgccagatggaaggggcgtggctgggcagcgacctggttgaccaggggaaagagcgtctgaaccgtctcggcttctttgaaaccgtcgacaccgacacgcagcgcgttccgggtagcccggatcaggttgatgtggtgtacaaggtgaaagagcgcaacaccggtagctttaacttcggtatcggttacggtacagaaagcggcgttagcttccaggccggcgttcagcaggacaactggttaggtaccggttattccgtggggattaacggcaccaaaaacgactaccagacctacagcgaactgtccgttactaacccatactttaccgttgacggcgtgagcctcggtggtcgtatcttctataacgacttccaggcggacgacgcggatctatccgactataccaacaagagttacggtacggatgtgacgcttggcttccccatcaacgagtacaacacgttgcgtgctggtctgggttatgtccataacaaactgtccaacatgcagccgcagatcgcgatggatcgttatcttgagtcgatgggacaatctgctgataccagcagttttgccgctgatgacttcacctttaactacggctggacctataacaaacttgaccgtggttatttcccgacggacggttcgcgcgtcaatctgacggggaaagtgacgattccaggttccgacaacgaatactacaaagtgtcgctggataccgcgacctatgtgcctatcgataacgatcacaagtgggtggttctggggcgtactcgctggggttacggcgatggtttaggcggcaaggaaatgccgttctatgagaacttctatgccggtggttccagtaccgtgcgtggtttccagtcgaatactatcggcccgaaagcggtctataaaaatggcgcccatactagttgggacgataatgatgattacgaagactgtactcaggaatcaggctgtaaatcagatgatgcggtaggtggtaatgccatggctgtcgccagcctggaatttattaccccgacgccgttcatcagcgaaaagtatgccaactcggttcgtacctccttcttctgggatatgggtaccgtttgggatacgaactgggatccgtcatctgcgccgtcagatgtaccggattacagcgatccaggcaacatccgtatgtccgcgggtatcgcattacaatggatgtccccattggggccgttggtcttctcctacgcccagccgtttaaaaagtacgatggagacaaagccgagcagttccagtttaacattggtaaaacctggtaattgttcactgcaaaggaatgcattggtagtgtagcgatgacttttggcgatgcccccagggatcgccaggccacgcaaagagctgtaccttcgggtgcaaatgggatggtaaggagtttattgtgaaaaagtggttattagctgcaggtcttggtttggcgatggtaacgtccgcacaggctgctgacaaaattgcaatcgtcaacatgggtaatctgttccaacaggttgcgcagaagacgggtgtatccaatacactggaaaacgaatttaaaggccgtgcggctgaactgcaaaaaatggaaaccgatctgcaatctaaaatgcagcgtctgcaatccatgaaagcaggtagcgatcgtactaagctggaaaaagacgtgatgtctcagcgccagactttcgcacaaaaagcgcaggcttttgagaaagatcgcgctcgtcgttccaacgaagaacgcaacaaactggtgactcgtatccagactgcggtgaaaaaagtggctaacgaccagagtatcgatctggtggtagacgcaaacaccgttgcttacaacagcagcgatgtgaaagacatcaccgctgacgtactgaaacaggttaaataagtaatgccttcaattcgactggctgacttagcagaacagttggatgcagaattacacggtgatggcgatatcgtcatcaccggcgttgcgtccatgcaatctgcaacaacaggccacattacgtttatggtgaatcctaagtaccgtgaacacttaggtttatgccaggcttctgcggttgtcatgacgcaggacgatcttccttttgctaagagtgcggcgctggtagttaaaaatccctacctgacctacgcgcgcatggcgcaaattttagatactacgccgcagcccgcgcagaatatcgcgccaagcgccgtgattgatgcgacggcaacgctgggtagcaatgtttcagtcggcgcgaatgcggtgattgaatctggcgtacaactgggcgataacgtggttatcggcgcaggctgtttcgtcggaaaaaatagcaaaatcggggcgggttcacgcttgtgggcgaacgtaacgatttaccacgacattcagatcggtgagaattgcctgatccagtccagtacggtgatcggcgcggacggttttggctacgctaacgatcgtggcaactgggtgaagatcccacaactgggccgggtcattattggcgatcgtgtcgagatcggcgcttgtaccaccattgaccgtggcgcgttggatgatactgttattggcaatggcgtgattattgataatcagtgccagattgcacataacgtcgtgattggcgacaatacggcagttgccggtggcgtcattatggcgggtagcctgaagattggccgttactgcatgattggcggcgccagcgtgatcaatgggcatatggaaatatgcgacaaagtcacggtaactggcatgggtatggtgatgcgtcccatcacggaaccgggcgtctactcctcaggcattccgctgcaacccaacaaagtatggcgtaaaactgctgcactggtgatgaacattgatgatatgagcaagcgtctcaaagcgattgagcgcaaggttaatcaacaagactaacgttccgccttgtagttgccattcttttccggcctgtcacattcatacgattgcggcaggccgtgttattattgcctttttgtatatttggacaggaagagtattttgactactaacactcatactctgcagattgaagagattttagagcttctgccgcaccgttttccgtttttactggtcgatcgcgtgctggactttgaagaaggtcgttttctgcgtgcggtgaaaaatgtctccgtcaacgagccgtttttccaggggcatttcccgggcaaaccgattttgccaggcgtgctgattctggaagcgatggcgcaggcaaccggtattctggcgtttaaaagcgttggtaaactggaacctggcgaactgtattatttcgcgggtattgatgaagcgcgctttaagcgtccggtggtgccaggcgatcagatgatcatggaagtcactttcgagaaaacgcgccgtggcctgacccgctttaaaggggttgcgctggtcgacggtaaagtcgtgtgcgaagcaaccatgatgtgtgctcgtagccgggaggcctgattcgtgattgataaatccgcctttattcatcctaccgccattgtggaagacggcgctgtaattggcgctaatgcccacattggtcccttttgtattgttgggccgcaggtcgaaattggtgagggaaccgtactgaagtctcatgtggtcgtgaatggtcaaaccaaaatcggccgcgacaacgagatttatcagtttgcctccatcggtgaagtgaaccaggatctgaaatatgcgggtgagccgacccgtgtggaaattggcgatcgtaaccgcatccgcgaaagcgtcaccattcatcgtggtacagtgcagggcggtgggttgacgaaggtgggtagcgataacctgctgatgatcaatgcgcatgtcgcacatgattgtacggtaggtaatcgctgtatcctcgccaacaacgccacgctggcggggcacgtatcagtcgatgattttgcgatcatcggcggtatgacggcagttcatcaattctgcattatcggtgcgcatgtgatggtcggcggctgctccggcgtggcgcaggatgtccctccgtatgtgattgcgcagggtaaccatgcgacgccgttcggggtaaatatcgaagggctgaagcgtcgcggctttagccgtgaagggctggtggcgattcgtaatgcctacaaactgttgtaccgcagtggtaaaacgctcgacgaagcgaagctggaaatcgctgaacttgctgaaaagcatccggaagtgaaggcgtttaccgagttctttgagcgttcaacgcgcggtccgattcgttaatggcggcacagcgtcctttaacgattgccctggtcgccggtgaaacgtccggcgatattcttggcgcaggcttaattcgtgcgctgaaagcgcgcgtacccaacgcccgttttgtgggcgttgcggggccgcgtatgcaggccgaagggtgtgaagcctggtacgagatggaagagctggcggtcatgggcattgttgaagtgctcggacgtttacgccgtttgttgcatatccgcgccgatctgacccgccgttttaccgaactcaagcccgatgtctttgtcgggattgatgcccctgatttcaatattaccctcgaaggtaatctgaaaaaaaaagggattaagaccattcattatgtcagcccgtccgtttgggcctggcgacagaaacgcgttttcaaaataggcagatccacccatatggtgttggcttttctgcctttcgaaaaagcgttttacgataaatttaacgtcccgtgccgctttatcggtcacaccatggcggatgccatgccgctggacccggataaaaatgcggcgcgcgacgtgctgggtatcccgcatgacgcccattgtctggcgctactgccaggcagccgtggcgcggaagtggaaatgctcagcgccgatttcctgaaaaccgcacaattgctgcgacagcgctatcccgatctggaagtggtagtgccgctggtgaacgcgaaacgccgcgagcagtttgaaaaaattaaagcggaggttgcgccggatctcgccgttcatttgctggacggcatggcgcgcgaggcgatgatcgccagcgacgcggctctgctggcctcgggtacggcggcactggagtgtatgctggcaaaatgcccgatggtagtgggatatcgtatgaagcccttcactttctggctggcgaaacgtctggtgaaaacggagtatgtgtctttgcctaacctgctggcgggaagagaattagtcaaagagctgttgcaggaagagtgcgaaccgcaaaaactcgccgaagcgctgttgccgctactggcgaacggtaaaaccagccatgcgatgcacgacaccttccgtgaattgcatcagcagatccgctgtaatgccgatgagcaggcggcagatgccgtcctggagttagcacaatgatcgaatttgtttatccacacacccatttagtggcgggtgtggatgaagtgggccgtggcccgctggtgggcgccgtagtgaccgccgccgtgatcctcgatccggcgcgtccgatcgtcggtctgaatgattccaaaaaattgtctgaaaagcgtcgtctgtcattgtatgacgagattaaagaaaaggcgttaagctggagtctggggcgcgcggaagcgcatgaaattgatgagctgaatattttgcacgccaccatgctcgccatgcagcgcgctgtcgctggtctgcatattgcgccagaatatgtgctgatcgacggcaatcgctgtccggagctgcctgtgccgtcaatggccgtggtgaaaggcgacagccgcgtggcggagattagcgcggcgtctattctggcgaaagtcacccgcgacgcagaaatggcggcgctggatatcgtttttcctcagtatggctttgcgcagcacaaaggctatccaaccgcttttcatctggaaaagttggcccagtatggcgcgacggcgcaccaccgacgcagttttgcgcctgttaaacgcgctctgggacttgtgtcctgattcttgtatcgagaaatctgaagatgtctgaaccacgtttcgttcacctgcgggtgcacagcgactactctatgatcgatgggctggcgaagaccgggccgctggtgaaaaaggcggcctcattaggtatgcctgcgctggcgatcaccgattttaccaacctctgcggtctggtgaagttctacggagcgggtcatggcgcgggcattaaacccatcgtcggggcggactttaacgttcacaacgaactgctgggagatgagctgactcatctgacggtactggcggcgaataatacgggataccagaacttgacgttgctgatctcgaaagcgtatcagcgcggctacggcgcggcaggcccgattatcgagcgcgactggctggtagagcttaaagaaggtttgatcctgctttccggcgggcgcatgggcgacgtaggccgctgtctgctacgcggcaaccaggcgctggtggaggagtgcgttgctttctatgaagcgcattttcccgatcgctacttcctggaactgatccgtaccggcagacaggatgaagagacctatctccatgctgcggttgagctggctgaggcacgtggtttgccggttgtcgcgacaaacgatgtccgttttcttgaaagcgatgattttgacgcccatgagattcgtgtcgcgatccacgacggtttcacgctcgacgatcctaaacgtccacgcaattattcaccgcagcagtatatgcgcagtgaagaagaaatgtgcgagctgttctccgatattccggaggcgctggaaaatacggtggagattgccaaacgctgcaacgtaacggtgcgtctgggtgaatatttcttgccgcagttcccgaccggcgatatgaccaccgaagattatctggtcaaaaaagcgaaagaggggctggaagagcgtctggctttcctgtttccggacgaagaagagcgcaaaaagcgtcgcccggaatatgacgagcgtctggatattgaactacaggttatcaaccagatggggttccctggctacttcctcatcgtgatggagtttatccagtggtcaaaagataacggcgtgccggtagggccgggacgtggttccggggctggttcgctggtggcctacgcgctgaaaattaccgaccttgatccgctggaatttgacctgctgttcgaacgtttcctgaacccggaacgtgtctcgatgcctgacttcgacgttgacttctgtatggagaaacgcgaccaggtgattgaacacgtcgcagatatgtacgggcgtgatgcggtatcgcaaattatcaccttcggtacgatggcggcgaaagccgttatccgcgatgtgggccgcgtgctggggcatccgtacggttttgtcgatcgtatctcgaagctggtgccgcccgatccgggcatgacgctggcaaaagcctttgaagcggaaccgcaactgccggaaatttacgaggcggatgaagaggtcagagcgctgatcgatatggcgcgtaagctcgaaggcgtcacgcgtaacgccggtaagcacgctggcggcgtggtcatcgcgccgaccaaaattaccgactttgcgccgctgtactgcgatgaagagggcaagcatccggttacccagtttgataaaagcgacgtggaatatgccgggctggtgaagttcgacttcctcggtttgcgtacgctgactatcatcaactgggcgctggagatgatcaacaagcggcgggcgaagaatggcgagccaccgctggatatcgctgccattccgctggacgataaaaaaagcttcgacatgctgcagcgctcggaaaccacggcggtcttccagcttgaatcgcgcggcatgaaagatctgatcaaacgtctgcagccggactgctttgaagatatgatcgcgctggtggccctgttccgtcccggcccgttgcagtcagggatggtagataacttcatcgaccgtaagcacggtcgtgaagaactctcttacccggacgttcagtggcagcatgaaagcctgaagccggtactggagccgacctacggcatcattctgtatcaggaacaggtgatgcagattgcccaggtactttccgggtatactctcggcggcgcggatatgctgcgtcgtgcgatgggtaagaaaaagccggaggagatggccaaacagcgttccgtttttgaagaaggcgcgaaaaagaacggtatcgacggcgaactggcgatgaaaatctttgacctggtggagaaattcgccggttacgggtttaacaaatcgcactccgccgcttatgcgctggtttcttaccagacgctatggctaaaggcgcactatccggcagagtttatggcggcggtgatgactgccgatatggacaacaccgagaaggtcgtcggcctggtggacgagtgctggcggatgggactgaaaattctgccgccggatattaactccgggttgtaccatttccacgttaatgatgagggcgagatcgtctacggtattggcgcgatcaaaggcgtcggcgaaggtccgatcgaagcgatcatcgacgcgcgtaatcagggcggctatttccgcgagctgtttgatctgtgcgcgcggaccgacaccaaaaagctcaaccgccgggtgctggaaaagctgatcatgtccggggcgttcgaccgcctggggccgcaccgcgccgcgctgatgaactcattgggcgatgcgctgaaagccgccgaccagcacgccaaagcggaagctatcggtcagacggatatgttcggcgtgctggcggaagagccggagcaaatcgaacaatcctatgccagctgccagccgtggccggagcaggtggtgttagatggggaacgtgaaacgttggggctgtacctgacgggccaccctatcaatcagtatttaaaagaaattgagcgctatgtcggcggggtaaggctcaaagacatgcatccgacagaacgtggtaaagtcaccacggctgcggggctcgtgattgccgcaagggttatggtcaccaagcgcggcaatcgtatcggcatctgtacgctggatgaccgttccgggcgtctggaagtgatgttatttaccgacgcgctggataaataccagcagttgctggaaaaagaccgcatacttatcgtcagcggacaggtcagctttgatgacttcagcggggggcttaaaatgaccgcccgcgaagtgatggatattgacgaagctcgcgaaaaatacgctcgcgggcttgctatctcgctgacggacaggcaaattgatgaccagcttttaaaccgactccgtcagtctctggaaccccaccgctcggggaccattccagtacatctctactatcagagggcggatgcgcgtgcgcggctgcgttttggcgcaacgtggcgtgtctctccgagcgatcatttacttaacgatctgcgtggcctcattggttcggagcaggtggaactggagtttgactaatacaggaatactatgagtctgaatttccttgattttgaacagccgatagcagagctggaagcgaaaatcgattctctgactgcggtaagccgccaggatgagaaactggatattaatatcgatgaagaagtccatcgcctgcgcgaaaaaagcgtagaactgacgcgcaaaatcttcgccgatctcggcgcatggcaggtagcccaactggcgcgccatccgcagcgtccgtacaccctggattatgtccgtctggcgtttgatgagtttgatgagctggcgggcgatcgcgcctatgctgatgacaaagccatcgtcggcggtatcgcgcgtctggaagggcgaccggtgatgatcattggtcatcagaaaggtcgtgaaaccaaagaaaaaattcgtcgtaactttggcatgccagcgccggaaggctaccgcaaagcgctgcgcctgatggaaatggctgaacgcttcaacatgccgattatcaccttcatcgacaccccgggtgcataccctggcgtgggcgcggaagagcgtggtcagtctgaagccatcgcccgcaacctgcgtgagatgtctcgtctgaacgtaccggtcatctgcaccgtgattggcgaaggcggctccggcggcgcattggcgattggcgtgggtgataaagtgaatatgctgcaatacagcacctattccgttatctccccggaaggttgcgcctctattttgtggaagagcgccgacaaagcaccattggctgctgaagcgatgggcatcatcgcgccgcgtctgaaagagctgaagctaatcgattccatcattccggagccgctgggcggcgcgcaccgtaatccggaagcgatggcggcatcgctaaaagcgcagctgctggaagatttagccgatctcgatgtgttaagcaccgatgatttaaaaaaccgtcgttaccagcgtttgatgagctacggttacgcctaatcatttacctcatttttccccaagaggccggataatccggcctctttttttggtcgaggaaaaatgagacgccgatgagttgatgtgattaaacgcaacggcatgttctccctgacactgtatcaactgccaggcgtgtggccagggcaggcagtgaactacccttcaaggagaaaattatgggattgcaaaaaacactggcgctcagcgccgtagcggcagggatcatgttgagcttatccggtgcgcaggccgcgccgctgcttagcagtagtgagccaatgaccattaacgccagcgatctggcggcgaaagagaaagcgctaacggattttccgttaatggaggccgtgaaatcctctattcagacgttggataacagcgcggtcgaacaaatcgaaccggggcgcgccgctaacccggcaaacgtaaaacgcgttgaaagtattctgaaagaggccgactgggattatctgttcccgatgcgcgcgccggaatatacttactctaacttcctgaaagcgataggtaaattcccggcggtttgtggtacctacaccgatggacgcgatagcgacgctatctgccgtaaaaccctggctactatgtttgcgcattttgcccaggagacgggcggtcacgaaagctggcgtgacattccggaatggcgtcaggcgctggtctatctgcgcgaagtcggctggacagaagggcagaaaggcggctacaacggcgaatgtaacccggatgtatggcagggccagacctggccgtgcggtaaagataaggacggcgatttcctcagctattttggccgcggggcaaaacagctttcttataactacaactatgggcctttctctgacgcgatgtatggcgacgttcgccctctgctggataaacccgagctggtggcggatacctggatgaacctggcgagcgccgtcttcttctttgtgtatccgcagccgccgaagccgtctatgctacatgtgattgacggtacctggcagccaaacgatcgcgataaagcaaacggcctggtatcaggtttcggcgtcactattcagatcatcaatggcggcgtggagtgcggcggcgcagatgagaatgcgcagtcgcttaaccgcatcgcctactacaaagagtttgccaactacctgaaagtgccggtgccggcggacgaagtgttgggctgtaaaaagatgaagcagttcgatgaaggcggcgctggcgcgttaccgatctattgggaacaagactggggctggagcgccgatactgcggacggtaaaacctattcctgccagttagtgggatatcagacgccgtataccgcctttaaagagggcgactacacgaaatgtgtacagcattatttcaacgttaatgtcgtcgatgataacggaaccactgaaccggatgtcacgccaactccggcgccagtgacggatgaaaacgtggcgccagtcgcgcgcattgccggaccggtcggggcggtggaagccggtagcccggtttcactcagcgcggaaggatcgaccgacgcgaatggcgacaagctcacctatacctggatgtcgcaggatggcaaaacgctgagcggacaggataaagccgttgtgattttcaacgcgccggatgtcactcagaacacccagtatgtggtgaatctgaccgttagcgacggtacgctctccagtacagcggtttatacgctgaatgtgaaagcgaaggccgccgctgcggatgacgaagataagaccaccagctaccctgcctggagcagcagccagaaatggaatccgggcgacatcgtcaacagtaatggcgcattgtaccagtgcaaaccgttcccggaaggctcatggtgtaatgttgcgcctgcctactatgagcccggcgtagggattgcctgggccgatgcatggaacgcattgtaataagataaatcctgtcggtgctttgcatcggcaggattgttactatgcttatctcaggttttttcaggagaaagcatgaacatcatcgccattatggggccgcacggggtttattataaagatgaacccatcaaggagcttgagcgtgcattacaatccctgggatttcaaattatctggccgcaaaatagcgttgacttgttgaagtttattgaacataacccgcgcatctgcggcgttatttttgactgggatgaatacagtctcgacctttgtagcgaaatcaaccagctaaatgaataccttcctctctacgcctttatcaataccaactccacgctggacgttagcgttcacgatatgcgcatggcgctgtggttttttgagtatgcattggggctggctgaagatatcgcgacgcgcattcatcaatatacaaacgaatatctcgataatattacgccgccgtttaccaaagcgctttttacctacgccaaagaaggaaaatataccttttgtacgccgggtcatatggcgggaacggcgtatcagaaaagcccgccaggctgcctgttttatgacttttttggcggcaataccttaaaagctgatgtgtcgatttcggtgactgaactgggatcgctgctggatcacaccgggccgcatctggaagcggaagagtatatcgcccgtacttttggcgccgagcagagctatatggtgacgaacggtacgtcgacctcgaataaaattgtcggtatgtatgccgcgcctgcgggaagtacgctacttattgatcgtaattgtcataaatcgctggcgcatttgctgatgatgagcgatgtggtgcctctctggttgaagccgacgcgcaatgcgctcggcattctcggcggtattccccgaagggaatttacccgtgcaagcatcgaaagcaagatagaggagacccctcaggcgcaatggccggtgcatgcggttatcaccaattcgacttacgatggtctgctgtataacactaactggatcaagcaaatgctggacgttccctcgatccattttgattccgcctgggtaccctatacccatttccatccgatctaccaggggaaaagcgggatgagcggcgatcgggtgcccggaaaagtgattttcgaaacgcaatccacccataaaatgctggcggctttttcgcaggcgtcgcttattcatatcaaaggggaatatgacgaagagacgtttaacgaagcgtttatgatgcacacttccacatcgccgagctatcccattgtcgcctctatcgagaccgcagcggcgatgctgcgcggcaatccagggaaaagattgattaatcgttcggtggaacgggcgctccattttcgtaaagaggtacagcggctacgtgaagagtccgatagctggttctttgatatctggcagccggaagaggttgatgaggccgaatgctggccggtcacgccgggagaaacctggcatggcttcaccgatgccgatgacgatcatatgttcctcgatccggttaaggtgacaatcctgacgccggggatggatgaacagggcaacatgagcgaagaggggatacccgccgcgctggtggcgaagttccttgatgagcgaggcgtggtggtggaaaaaaaccgggccgtataatctgctgtttttgttcagcatagggattgataagacccgtgcgatggggctgctgcgcggactgacggaatttaaacgcgcctacgatcttaacctgcgcgtcaaaaatatgttgccggatctgtatgcggaagatccggatttttatcgcaatatgcgcattcaggatctggcgcaggggatccataaactgatccgccagcacgatcttccggggctgatgctgcgggcgttcgaggttttaccggagatgatcatgaccccgcaccaggcctggcagcgtcagatcaaaggtgaggtggaaaccgtggcgctcgatcaactgccagggcgcgtttccgcgaatatgatcctgccttatccgccaggcgttccgctgttgatgcccggcgagaggatcacgcaacagagtcgggccgtgctcgattttctgctgatgctctgctcgattggccagcattatcccggttttgaaacggatattcacggcgcgaaacggaatgaagacggggtgtaccaggtacgagtcttaaaacacgcctgctagcttgcctgacgggaatgtgacgagtaacgtactgataatcaataaaggagacgctatgctgggattaaaacaggttcatcacatcgcgatcattgcgacagactatgcggtgagcaaggcgttttattgcgatattctggggttcgatctgctaagcgaagtctggcgggaagagcgtgactcgtggaagggcgatttggcgctaaacgggcagtatgtgattgagcttttctcttttcccttccctccggcgcgtccaagccgacctgaagcctgcggcctgcgccatctggctttcagcgtggaaaatgtggaaaacgccgttgcgcatctggaaaagcatcaggttaagtgcgaaccgatacgcatcgatccgtataccgggaagcgctttacttttttcaacgatccggacggtttaccgcttgagctgtatgagcagtaaggcttgtcattaagacgctcgccaggtaacgttgccgggctaagtcactataagcatggatcatgaccactctcacgttgaatacctcgttactctcttctcgccgtattctggctgcctttagcggcggcctggattctacggtgctgttgcatcaactggtgttgtggcgagaacgccatcctgacgtcacgctgcgtgctatccatattcatcacggtttaagccctcatgctgatagctgggtgcggcattgcgaaaccgtatgcgaacgctggcaggttccgctggtagtggagcgggtgacgctggcggataatggcctgggtatcgaggcccatgcgcgtgaagcgcgctaccgggcgttcgcacagacgctattgcctggcgaagtgctggcaaccgcgcagcaccttgacgatcagtgtgaaacgtttctgctggcgttaaagcgcggcagcggtccggccggactttccgcgatgggagaacgctcgccttttgccggaactctgcttcttcgcccgctgttgagagaaacgcggaagacgctggaacagtgggctgtgcgtcatggcttatgctggattgaagatgaaagcaatcaggatgacgcctacgatcgcaattttttacgcctgcgcgcgcttccgctcttacagcagcgctggccgcattttcctgcggcggtagcccgtagtgcgacgctctgcgccgagcaagaaaggctgctggacgagcttctggccagcgatcttactgactgtatcacggcggagggaacattgcggctctctccattaatgtcgatgagcgatgtacggcgggcggcgattttgcgtcgctggctggcgatgcgtaatgcgccgatgccctctcgcgacgcgctggaacgtatctggcaggaggtggcgctggcgcgcgacgatgcctctccctgtttacgctttggcgatcacgagattcgccgttaccagtcgcaactgtggtggattaaatccgtggccggacaacacgaaacgacggtcgcctggcccgtctggcaaacaccgctggcgctgcctgccggcttagggacggtacagctcgttcctggtggcgaactgcgccgaccgcgagaggaagaatccgtcagcattcgttttaaagcgccaggcgtgttacatattgtcgggcgtaacggtggacgtaaattaaagaaaatctggcaggagcaggggatcccgccctggcgacgagataccacgccgctgttgttttacggcgaaacgctgattgcggctgcgggtgtttttgtgacgcgtgagggagcagcagaagataaagaaggggtgagtctggtttggcatgcctgatggcgctgcgcttatcaggcctacgtatcgcatggaacgtaggccggataaggtgcttgcaccaccatccggcaacaaaatactcaggattcgctaactaccacggtaccaatttccgggtggctgaaactggcgattttatcgagacgaagttcacaagactcgccggaaacttcggcaagcagatattctacgtttttacgtaagatcaaatcgttcgcttttgcctgcaaaacctcgccatcttttaacgttagcgtcagtattaaatgatgcatgcaggcaagctcaagactatcgtagtcatcgcaattaatgggttgatacgtttcattcattgacataatcgctcaccagtaagttcgcggcagcataagctgccttttccctgaccgactctgaaagggcgctatctgccgccacttcattaagcactttcaatacacaacccagcgcatccgggacataccctaagtctccgctggcgatttccgcataccgcttgcgtactaactcacaatatttttccacatgccctcctgtcagcattctgacttaaccgtggatgcaagtctaagcctacgaagttaaatcttgtttagcaaggtgactataccatactcatttgcgcaatatcagcgcctgacgcgagtgggtaaaagattcgttaacagccttttagcgcggttttcgctacaatgggcgcctgattcgaaaggagttttctcatggcgcttaaagcgacaatttataaagccgtcgtcaatgtggctgaccttgatcgcaaccggtttctggatgcggcattgacgctggcgcgtcacccttctgaaacgcaggagcgcatgatgctgcgcctgttggcatggataaaatatgctgatgaacggttgcagtttacacgtgggctcagcgcggaagatgagccggaggcctggctgcgcaacgatcatctgggcatcgatctctggatagagctggggctgccggatgagcgccgtattaagaaagcctgtactcaggcgagcgatgtcgcgctctttgcttataactcccgggcggcgcaaatctggtggcagcagcatcaaagcaagtgcgcgcagttcgctaacctgtccgtctggtatctggatgacgggcagctggcgcagctcagtgaatttgccgatcgtaccatgacgctacaggcgacgattcaggacggcgcaatctggctttctgatgctcggaataatctggaaatacagctaaccgcctggcaacagccctcatgattgccatctcccggacggtctccatagccgataatgagctggaaattacggccattcgtgcgcagggcgcgggtggtcagcacgtaaataagacctctagcgcgattcatttgcgctttgacattcgggcctctggcctgccagagtattataaacagcgtttgctgacggccagccaccatctgataagcgatgatggcgtcattatcattaaggcgcaggagttccggagccaggagctcaaccgggaagcggctatcgccaggctggttgccgtcataaaagaattaaccgcggagcagaaaagccgtcgcgcaacccgtccgacgcgtgcctcgaaagagcgccgtttgtcctcaaaggcgcaaaaatcttctgtaaaggcgcttcgcggcaaagttcgtcgtccactggattgacgggcaggaatagcaatttcataaggattttatggtgagaacagcaatattgtcagtagcggcagcctgtacgctatttgcattgatagggtgtaataaccgtgcggaagttgacgccctgcaacctgcgcaggcggcggaattaaaacccatgcagcaaagctggcgcggcgtgctgccctgtgcggattgtgaaggtattgaaacgtcactatttctggaaaaagacggcacatgggtgatgaacgagcgctatcagggcgtgcgcgaagaaccttcctcttttgcgtcatacggtacctgggcgcggacggcggataaactggtgttaaccgacagcaatggcgagaaatcgtattatcgcgcgaagggcaatgcgctggagatgctcgacagagaaggcaatccggtggcttcgcagcttaattatacgctggtgcctgttaccgccagcctgccggtaacgccaatgccgctgcgtggtatgtatgtatacagggccgatgcggcgacctttaccgattgcgcgaccggaaaacggctgccggtcgccagtaacgcccagcttgagcgcggctatctggcggcgaaaggtgaagcggaaaaaccggtgctgctgacggtagaagggcattttgtgtttgccgcgaacccggacacgggcgagccggtaaaaacgctaatagccgataaaaatgcgaagtttgcgccgggtaaagattgcactcactaataaaaggcctcgcagggtgcgaggcctttacatatctgccggatggcgccgggcaaccccaacaaaatgtcgtttagcccttaatcgccttgaccagataatcaacgatatcgccggttttaatcagcgatttttcaccgctacgacggtatttatactcaatatcgtcgttatccaggttgcgatcgccaatcacgatagtatgtggaataccaatcagctccatatcggcaaacatcacgcccgggcgctctttacggtcgtccatcagcacttcaatgccctgcgcgcgcaattcgctgtacagcttttccgccagctcctgcacacggaaggatttgtgcatattcatcggcagaatagcgacctggaaaggcgcaatggcgtcaggccatacaatgccgcgctcgtcaaagttctgctcgatagcagcggcaacgacacgtgttacgccgataccgtagcagcccattgtcaggatctggttacggccatcttcaccctgaacggaggctttcagcgcttctgagtacttggtacctaactggaagatgtgacccacttcgataccgcgtttgataagcaacgttccctgaccatccggactcggatcgccggcgactacgttacggatgtcggcaacaacaggcgtcgccacatcgcgatcccagttaataccaaagtagtgtttaccgtcgatgttggcgccagcggcaaaatcgctcatggcggcaacggtacgatcgatgatgaccggaatcggcatattgaccgggccgagggagccagggccggcattaattacggcgcgaatctcttcttcggtagcgaaggtcagcgggctggcaacgtgcggcagtttttccgctttaacttcattcagttcatgatcgccgcgaaccagcagagccaccagcggagacttgctgtctttcaccgctttcaccagcagcgtttttaccgttttttcaattggcaggttgaattgttccaccagctccgcgatggttttggcatttggcgtatcgaccagagtcatttcctgcgtcgccgctgcgcgcggcgtttgcggcgcgatagcttctgccagttcaatgttagccgcgtaatcagaaacatcagagaaaacgatatcgtcttcgccgctttgcgccagcacctggaattcatgcgaggcgttgccgccgatagaaccggtatcggcctgtaccgcgcggaaatccagccccatacggctgaagatacggctatacgcggcgtacatggcgtcataggtttcctgcaacgactcctgagaggtgtggaaagagtaagcatctttcatcaggaattcgcgcgaacgcatcacgccaaagcgcggacgcacttcatcacggaatttggtctggatttggaagaagttcagcggcaactgcttataagagctgagttcattacgcaccaggtcggtgataacttcttcgtgggtcgggccgagtacgaacggacgctcgccacggtcgacaaaacgcagcagttccggaccgtactgttcccaacgaccactctcttgccacaggtcggctggctgaacgactggcatcgacacctcgatagcaccggcgttgttcatctcttcacgcacgatgttttcgacttttttcaggacgcgcaggccggtcggcagccaggtatataacccggaggcgagcttgcggatcatcccggcgcgcagcatcagctggtggctgataacctcggcgtcggcaggtgtctccttcagagtggagagcaggtattggctagtacgcatgttgttacggttccagttgaacgatcgaacaggctcaatgtgagcctgatacaaaaaaagtgatttagtttaccagcgtgcaagagatgtcaaaagagaagggcgtgaaattaccgtggttccagcgcaaacacttcaaatcccgagttaaccacacgccagcgcacgttaaaatcatgcagccagacggcataggttttgcccgtctcttcacccttacgataagccgggcgaggatcttgcgccagcacatcgcaaataaatgtccgtagctgcggataacgcctttccagcgtcgtaagctgttgagccacctcagcggtaaaactcacgggcatttcagctatcggcgcctgttgcgcatagctggcggcggcgtccggtaaggcctcggcaaacggtaaatacggtttaatatccaccaccggcgtgccatccaccagatccagactgcctaatttcagaattacgctctctttccggcactcgataccttttagcgcaacgagcgacatgccaatcggattggggcggaacgtggagcgcgtggcaaaaacgcccattctggcgttaccgccaagacggggcggacgaactgtcggccgccagccgccgtccatcgtctgatgaaaaacgaaaagcacccacaaatggctgaacgcttccaggccgcgaacggcatcggcctggttgtaaggcgctatcagatgcagttcgccgcaggcgcttttgaccagaccaggctggcgcggaacggcgaatttttctttatagggggagcgaataacgccgatttgttcaaactgaaagctgctcatttcgccgaaatattcagggcggacccgatacaaaccgcctgacgatagcagcctggcgtgccgctggtaatttcacagctgtgcagcaggacggcgttggctttcattttagatgcattaatctgcatacgcttgcgcgcagttggaatgttaggcggagagtcttgatttgtcgcctggcaggattcgccgctaacctcgccaagatctcggaaaggtttgccgactaagtcttcagcattggtgtaaatcctgacgggagcggcacgcggcgctttaggtttctccggctccgcttttggcggggttgcggtgctttgaacgggttcaacaggggatctgcttagcatggaacaaccgcccagcatgagtgccaataaacagatcggtaaagcacgcataatatttcctcaatgaatgttctaattgccagatattgaatcaggagcttgcataaatgacaagacgggcaatagcccgtcctgaataatattacagattgtggaatcagcctaaaacttaccagcctttcaccgcgccgccattaaaaactttatttgcggcttcgtacacttcatcagactgataagcctgaacgaattttttcacattctcggcgtctttgttatcttcacgcgtcacgatcaggttaacgtacggagaatctttatcttcaacaaagataccgtctttcgctggcgtcaggccaatctggctggcgtatgtcgtattgatgaccgctagcgcgatctgcgcgtcatccagcgaacgcggcaactgcggcgcttccagctcaacaattttcagatttttcgggttttccacgatatccagcgaggtaggaagcagaccgacgccgtctttcagtttaatcagccctactttttgcagcagcagcagggaacgaccaaggttggtcgggtcgttaggcacagcgacctgggaaccgtccttgagctcatccagggatttgatttttttggaatatcctgcaatgggatagacaaaagtcttaccaacggaaaccagtttgtaaccgcgatctttgatttgctgatccagatacggtttgtgctggaaggcattggcatcgatatcgcctttgctcagcgcttcattaggcagaacataatcattaaaggtcaccaattccacgtccaggccgtatttttctttcgcgactttctgcgcgacttcggcaacttgctgctctgcgccaacgattacgccgactttaatatgatttggatctttttcatcctgaccgcaacccgcaagtgccagagaaccaatcagagcacccactgccgcaaaggttttgaatttgaacgccatgcttatttccttaatgagtatttgtgttgtgtttaacgttacttatgcgtgacagccctgacgatgcgatcgccggataactgaattaaataaaccagaacgacaagtaataccagcaccgtattcatcacggtagcattgtatccaatataaccgtactgatagccgatttgaccgagaccgcctgcgccgacggcgccgcccattgcggagtaaccgaccagggtgatcagtgtaatggttgccgcattcaccagaccaggcagcgcttccggtaaaaggattttacgtacaatttgcagcggcgtggcgcccatcgctcgtgaggcttcaatcagcccggcagggatctctaacaacgcattttccaccatacgggcgataaaaggcgcggcgccgacggtcagcggtacaattgcagcctgcaaaccaatggaggtgccgacaattattcgggtaaaaggaatcatccacaccagcaggatgataaagggaatcgagcggaaaatattgaccaccgcagagagggagcgatacagcctggcgttctccataatctgccccgggcgcgtaacatacagcaatacgccaaccggcaggccaatcacgaaaccgaagaaaccggagacaaaggtcatcgccagcgtttcccagacgccacgaaccagtaaccacatcattgcctcagacataacccagtacctctactttcacatggtgatcctgcagccaggcaattgcggcttgcgtctcttcttgcgtgccgtgcatttccgttagcataatgccgaacttcacaccgccggcgtaatccatctgcgcgctgataatattattgttcacgttgaaacgacgcgcggtttcagaaagcagcggggcatccacagactgcccggtgaattccatgcgcagcatcggcacgctgtcagtttccggcgacgctttcaaacgcgcctggtaatcttccggaatgtccagatgcagagtggactgaataaacttctgcgccagcggcgttttaggatgcgagaagacttcgctgaccgtatcctgctcaataagctcgccattactgataacggcaacgcagtcgcagatacgtttcacgacatccatttcatgagtgataagcagaatcgtcaaccccagacgacggttgatatctttcagcaattccaaaatcgaacgggtcgttgcgggatcaagcgcgctggtggcttcatcgcacagcaacacttttggattactggctaacgcgcgggcaatcgcgacacgctgtttctgaccgccggaaagatttgccggatagctgtcgtgcttgtcgccaagaccgactaaatccagcagctctgtgacacggcgtttgatctcttcctttggtgtgttatccagttccagcggcaacgcgacgttgccaaacacggtacgggaagagagcaggttaaaatgttggaaaatcatgccgatttgacggcgagctttggtcaactcagactctgaaagcgttgttagctcctgaccgccgacctgaacgctaccttcggttgggcgttcaagtaagttaacgcagcggataagcgtacttttaccggcgccggaggcgccaatgacgccataaatctgcccggcaggaacgtgcaggctgacattatttagcgcctgaatggtgcgcgtcccctgctggaacactttggtaatattcgaaagtttaatcattgattctttattatcgtaatgaaatgagcggaggcattttcgtctgcctaatacggtcaacgccgtcaacagaatggatgttaaggcatccagacgtctaaatcaatcaggctttatacgatgagcactttcttgcctgctgaaacatgcgatactagcgccacttgctttactcaggagctataaaaggtggcaaagtttgtacccgcaatttttctcgaccgtgacggcaccattaatgtggatcacggctacgtacatgaaatcgatgcatttgagtttatagacggcgttattgacgctatgcgcgagctaaaaaaaatgggctatgcgttggtggtggtgacgaaccagtccggaatcgcgcgcggcaaattcactgaggcgcagtttgaaacgttaaccgaatggatggactggtcgttggcggatcgcgatgttgatttggacggcatctattattgtcctcaccatccgcagggcagtatagaagagttccgtcaggtatgtgattgccgcaagccgcatccaggaatgcttatctcggcgcgtgatttcctgcatatcgatatggcggcttcttatatggtgggagacaagctggaagatatgcaggcggcagcggcggcaaatgtcgggacaaaagtgctggtgcgtacgggcaaaccggtcacggcagaagcagaaaacgcggcggactgggtgttaaacagccttgctgacctgccatcagcgataaaaaagcagcaaaaataagcgttatggataaaagatgagcggttaaaacaaaaatgcatttttccgcttgtcttcctgaaccgactccctataatgcgcctccatcgacacggcggatgtgaatcacttcacacaaacagccggtcggttgaagagaaaaatcctgaaattcagggttgactctgaaagaggaaagcgtaatatacgccacctcgcaacggtgagcgaaagccgcgttgcactgctctttaacaatttatcagacaatctgtgtgggcactcgaagatacggattcttaacgtcctcggacgaaaaatgaataccaagtctcaagagtgaacacgtaattcattacgaagtttaattcattgagcatcaaacttttaaattgaagagtttgatcatggctcagattgaacgctggcggcaggcctaacacatgcaagtcgaacggtaacaggaagcagcttgctgcttcgctgacgagtggcggacgggtgagtaatgtctgggaaactgcctgatggagggggataactactggaaacggtggctaataccgcataacgtcgcaagaccaaagagggggaccttcgggcctcttgccatcagatgtgcccagatgggattagctagttggtgaggtaacggctcaccaaggcgacgatccctagctggtctgagaggatgaccagccacactggaactgagacacggtccagactcctacgggaggcagcagtggggaatattgcacaatgggcgcaagcctgatgcagccatgccgcgtgtatgaagaaggccttcgggttgtaaagtactttcagcggggaggaaggtgttgtggttaataaccgcagcaattgacgttacccgcagaagaagcaccggctaactccgtgccagcagccgcggtaatacggagggtgcaagcgttaatcggaattactgggcgtaaagcgcacgcaggcggtctgtcaagtcggatgtgaaatccccgggctcaacctgggaactgcattcgaaactggcaggcttgagtcttgtagaggggggtagaattccaggtgtagcggtgaaatgcgtagagatctggaggaataccggtggcgaaggcggccccctggacaaagactgacgctcaggtgcgaaagcgtggggagcaaacaggattagataccctggtagtccacgccgtaaacgatgtctacttggaggttgtgcccttgaggcgtggcttccggagctaacgcgttaagtagaccgcctggggagtacggccgcaaggttaaaactcaaatgaattgacgggggcccgcacaagcggtggagcatgtggtttaattcgatgcaacgcgaagaaccttacctggtcttgacatccacagaactttccagagatggattggtgccttcgggaactgtgagacaggtgctgcatggctgtcgtcagctcgtgttgtgaaatgttgggttaagtcccgcaacgagcgcaacccttatcctttgttgccagcggttaggccgggaactcaaaggagactgccagtgataaactggaggaaggtggggatgacgtcaagtcatcatggcccttacgaccagggctacacacgtgctacaatggcgcatacaaagagaagcgacctcgcgagagcaagcggacctcataaagtgcgtcgtagtccggattggagtctgcaactcgactccatgaagtcggaatcgctagtaatcgtggatcagaatgacacggtgaatacgttcccgggccttgtacacaccgcccgtcacaccatgggagtgggttgcaaaagaagtaggtagcttaaccttcgggagggcgcttaccactttgtgattcatgactggggtgaagtcgtaacaaggtaaccgtaggggaacctgcggttggatcacctccttaccttaaagaagcgtactttgcagtgctcacacagattgtctgatgaaaaacgagcagtaaaacctctacaggcttgtagctcaggtggttagagcgcacccctgataagggtgaggtcggtggttcaagtccactcaggcctaccagattcgctcccgtgctttgttgtggcaaagctcgcatacttcagtatgcttcgcttcaccacgccgcgcccggaaacgaatcaaaggtaagaggttctgactacacgatggggctatagctcagctgggagagcgcctgctttgcacgcaggaggtctgcggttcgatcccgcatagctccaccatctcgtgagtgtttacgaaaaaatacttcagagtgtacctgaaagggttcactgcgaagttttgctctttaaaaatctggatcaagctgaaaattgaaacacagaacaacgaaagttgttcgtgagtctctcaaattttcgcaacacgatgatgaatcgtaagaaacatcttcgggttgtgaggttaagcgactaagcgtacacggtggatgccctggcagtcagaggcgatgaagggcgtgctaatctgcgataagcgccggtaaggtgatatgaaccgttataaccggcgatacccgaatggggaaacccagtgtgattcgtcacactatcattaactgaatccataggttaatgaggcgaaccgggggaactgaaacatctaagtaccccgaggaaaagaaatcaaccgagattcccccagtagcggcgagcgaacggggaggagcccagagcctgaatcagcatgtgtgttagtggaagcgtctggaaaggcgcgcgatacagggtgacagccccgtacacaaaagcgcatgtgctgtgagctcgatgagtagggcgggacacgtggtatcctgtctgaatatggggggaccatcctccaaggctaaatactcctgactgaccgatagtgaaccagtaccgtgagggaaaggcgaaaagaaccccggcgaggggagtgaaaaagaacctgaaaccgtgtacgtacaagcagtgggagccccaccactaagccagtggtgaactccacatccgcatcctttgctgaggatacggttaacggagcgaaagcgacgttcaaccgcaaaacaagcagagggggcttagtggtggggtgactgcgtaccttttgtataatgggtcagcgacttatattctgtagcaaggttaaccgtataggggagccggagggaaaccgagtcttaattgggcgttaagttgcagggtatagacccgaaacccggtgatctagccatgggcaggttgaaggttgggtaacactaactggaggaccgaaccgactaatgttgaaaaattagcggatgacctgtggctgggggtgaaaggccaatcaaaccgggagatagctggttctccccgaaagctatttaggtagcgcctcgtgaattcatctccgggggtagagcactgtttcggctagggggccatcccggcttaccaacccgatgcaaactgcgaataccggagaatgttatcacgggagacacacggcgggtgctaacgtccgtcgtgaagagggaaacaacccagaccgccagctaaggtcccaaagtcatggttaagtgggaaacgatgtgggaaggcccagacagccaggatgttggcttagaagcagccatcatttaaagaaagcgtaatagctcactggtcgagtcggcctgcgcggaagatgtaacggggctaaaccatgcaccgaagctgcggcagcgaacgtatcacccaagacaactttacggagttgacgattgacggagcgaagcgacgtcaaagcgttcattaaagtcgagttggcttagggatacgttcgttgggtaggggagcgttctgtaagcctgtgaaggtgtgtcgtgaggcatgctggaggtatcagaagtgcgaatgctgacataagtaacgataaagcgggtgaaaagcccgctcgccggaagaccaagggttcctgtccaacgttaatcggggcagggtgagtcgacccctaaggcgaggccgaaaggcgtagtcgatgggaaacgggttaatattcccgtacttggtgttactgcgaaggggggacggagaaggctatgttggccgggcgacggttgtcccggtttaagcgtgtaggtgtgtgttccaggtaaatccggttcactttaacactgaggcgtgacgacgaggcactacggtgctgaagcaacaaatgccctgcttccaggaaaagcctctaagcatcaggtaacacgaaatcgtaccccaaaccgacacaggtggtcaggtagagaataccaaggcgcttgagagaactcgggtgaaggaactaggcaaaatggtgccgtaacttcgggagaaggcacgctgacacgtaggtgaagtgatttactcatggagctgaagtcagtcgaagataccagctggctgcaactgtttattaaaaacacagcactgtgcaaacacgaaagtggacgtatacggtgtgacgcctgcccggtgccggaaggttaattgatggggtcagcgcaagcgaagctcctgatcgaagccccggtaaacggcggccgtaactataacggtcctaaggtagcgaaattccttgtcgggtaagttccgacctgcacgaatggcgtaatgatggccaggctgtctccacccgagactcagtgaaattgaactcgctgtgaagatgcagtgtacccgcggcaagacggaaagaccccgtgaacctttactatagcttgacactgaacattgagccttgatgtgtaggataggtgggaggctttgaagtgtggacgccagtctgcatggagccgaccttgaaataccaccctttaatgtttgatgttctaacgtggacccgtaatccgggttgcggacagtgtctggtgggtagtttgactggggcggtctcctcctaaagagtaacggaggagcacgaaggttggctaatcctggtcggacatcaggaggttagtgcaatggcataagccagcttgactgcgagcgtgacggcgcgagcaggtgcgaaagcaggtcatagtgatccggtggttctgaatggaagggccatcgctcaacggataaaaggtactccggggataacaggctgataccgcccaagagttcatatcgacggcggtgtttggcacctcgatgtcggctcatcacatcctggggctgaagtaggtcccaagggtatggctgttcgccatttaaagtggtacgcgagctgggtttagaacgtcgtgagacagttcggtccctatctgccgtgggcgctggagaactgaggggggctgctcctagtacgagaggaccggagtggacgcatcactggtgttcgggttgtcatgccaatggcactgcccggtagctaaatgcggaagagataagtgctgaaagcatctaagcacgaaacttgccccgagatgagttctccctgagacttagagtctcctgaaggaacgttgaagacgacgacgttgataggccgggtgtgtaagcgcagcgatgcgttgagctaaccggtactaatgaaccgtgaggcttaaccttacaacgccgaagatgttttggcggattgagaagacaacaattttcagctcagattcagagtccgaaggattttacgctgagacaaggcggcaaacgcagcgacggaaggagcatacagaagtatgtgactgacgctcgcaagagcagccaacgccgtatcagtgtaaaagacacaggacggagcacaaagaatttgcctggcggcactagcgcggtggtcccacctgaccccatgccgaactcagaagtgaaacgccgtagcgccgatggtagtgtggggtctccccatgcgagagtagggaactgccaggcatcaaattagaagtatggcattaactttcggggcagttcactactcgacagagagtaggacaaaagcgaaagcttttgaacgttgcgaagcaacggcccgaagggtgaatcacgaagtgattcataaactgccaggcatcaaattaagcagtaaactgatgtaaaaatcagtggttgtaaaagaattcggtggagcggtagttcagttggttagaatacctgcctgtcacgcagggggtcgcgggttcgagtcccgtccgttccgccacttattaagagccctgagcattagctcagggctttttctttccatgtcatttaattattgctcaattcgcaaaaatcctctgcatttctcgctctttttctgcaaagcgctgaaggtcataatcccctcagttaacgaacatagtgattaaaaagaggaattctatgactatccctgcattcggtttaggtacttttcgcctgaaagacgacgtggttatcgcttctgttaaaacggcgcttgaactgggctaccgtgctgtcgacactgcgcaaatctatgataatgaagcggctgttggacaggcgattgctgagagcggcgtaccgcgtaatgagctgtacatcaccaccaagatctggattgaaaaccttagcaaagacaagctaatcccaagcctgaaagagagtctgaaaaaactgcgtaccgattatgtcgatctgacgctgatccactggccatctccgggtgatgccgtgtctgtcgaagaatttatgcaggcattgcttgaagctaaaaaacaagggctgactcgcgaaattggcatttcaaacttcaccattccgttgatggaaaaggctattgccgcggtgggcgcagacaatatcgccaccaaccagattgagctatctccgtatctgcagaatcgtaaggtggttgactgggcgaaagcgcacggtatccacatcacctcttatatgacgctggcatacggtaaggcgctgaaagatgaagtgattgcgcgcattgcggctaaacataatgcgaccccggcgcaggttattctggcatgggcaatgggtgaaggttactccgtgatcccttcatccaccaggcgtgaaaatctggcaagcaacctgctggcgcaggatctgcatctggatgccgaagataaaaatgcgatcgcggcactggactgcaacgatcgtctggttagcccggaaggactggctcctgcctgggattaattacccgatcctttgtacctttacccctctttcacagctcctgcgggagctgttcttatatattcgctcaaaaagtcgataaatgcccgaatacgtgtgctgacggcgcgatcgctgtagtaaacggcgctgaaaggcatttctaccggcagacgtttatcggccagcagttccaccagttctccccgcgcgatctctttatcaatcatataatctgaaagacatgcaatgccgttaccgttcaggcaaagttgttttaacgtttccccgctattggaagaaatcccacatttgatctcatggagctgcccgtcgctacaggcaatcggccaggtattgagcgaaacaggttctgagaaccccagacacagatgccgtttcaactcttcaacggtctcaggcttgccaaagcgggcaatataatccggcgaggcgataatcttgcgatagctggtaaataacgggcgcgcgcgcagacttgaatctgtcaacgtgcctgcgcgtatcgcaacatccacttttcgttcaataagattgatgaacgtttctgaggagacaagagacaacgttatttccggataccgttcacgaaaaggtttaatcagcggcatcaggaaatgcagcattaccggcgttgccgcatcgatacgcagtaagccgcgcggggtattacgcgactccatgatttccgtttctgcggcggccatttcttgcagtatctgctgcacgcgcctgaagtatcgctctccttcttcagtcaggctcagctgtcgggtcgtacgattaagcagactgacgccgagcttcatctccagctttttaactgcccggctgacagcggaattggcctgtccaagctgctctgccgcccggctgaagctgccgctttccacgacagcgacaaaaattgcgagttcttcggaggtggctttcatttttgctcctgaagcaaaattaaattgatattttggctatttttgtcattaaaacatccaggcatactgcgtgtcatctgattactgctgttatggagttatgtatgcctctcgctttatttgcactgacaataagtgctttcgctatcggtacgactgagtttgtgattgtcggcctggtgccgaccattgctcaacaactggctatctcgttaccttccgccggaatgctggtttcaatctatgcgctgggtgtggctattggcgcgccggtgctaaccgcgctgaccggacgcctgccgcgtaaacagttactggtcgcgctgatggtcttgtttacggcggggaatttgctggcatggcaggcaccgggctatatgacattaatcgtcgcccgtctgctgacgggcctggcgcacggcgtgttcttctcgattggatctaccatcgcgacaagtctggtgccaaaagagaaagcggcttctgcgatcgctattatgtttggtggtttaacggtagcgctggtcacgggcgtgccgctgggaacatttatcggtcagcattttggctggcgtgagaccttccttgcggtatcactgttaggcgtgattgcgctgatgagcagtcaattgctgattccggccaatattcccggtcgggcggccgccagcattcgtgaccaggtgaaagtactgactcatcctcgtctgttgctgatttacgccgttacggcgctgggctacggcggggtattcacggcattcaccttcctggcgccaatgatgcaggatctggcgggattctccccggcagcggtaagctggatcttactggggtatggcgtatcagtggctatcggcaatatctggggcggtaaactggctgataagcatggtgccgtgccggcgctgaaattcattttcgccgcgctgtttgttctgcttatggtcttccaggtgacggcctccacgcagtatgctgcgctggctaccatcctagtgatgggggtctttgccttcggtaacgtaccggggttgcaggtctacgtggtacagaaagcggaacaattcacgcctaatgcggtagatgtggcgtcaggtctgaacattgcggcgtttaacattggtattgcgctgggctccgtgattggcgggcaaacggtggagcattacggtttggcgcagacgccgtggattggcgccctcattgttctggtggctttcctgctgatgggtgtcagcggacgtcttgataaacctgtacgcattgctctggagtaaattattgatgtaagcgcctacttacaaaacaaactgcaattgttcgttgaaagtgagtgctaaaatccctataacagaagaaccagtccggttgaggactggttgacgttacagaggtttgaaagtcaaaagtgcgaaaaaacacctatgcgatgcgctatgttgccggacagcccgccgagcggattttgccgccagggtcgtttgcgagcattggccaggcattgcccgccggggaaccgctaagcaatgaagagcggatccgtatcctcgtgtggaatatattcaagcagcagcgagccgaatggttatcggtgctgaagaactacggcaaagatgcgcatctggtcctgttgcaggaggcacagacgacgcctgaactggtacagtttgccaccgctaactatcttgccgccgaccaggttcccgcttttgtactacctcagcatccgtctggcgtcatgacgctttctgccgcccatcctgtttactgctgccctttacgggaaagagaaccgattttacgtttggcgaaatcagccctggtgacggtatatcccttgccggatacccgtttattaatggtagtaaatgttcatgcggtaaattttagtctgggcgtggacgtatacagtaagcagttacttccgatcggcgaccagattgcgcaccatagcggccctgtcattatggcgggtgattttaatgcctggagccgcccacgtatgaatgcgttgtaccgctttgcacgtgagatgtcgctgcgccaggtgcgtttcactgacgatcagcgccgtcgtgcgtttggacgaccgctggattttgttttttatcgtgggttaaacgtgaatgaagcctccgtactggtgacgcgcgcttccgatcacaatccgctactcgttgaattcagtcccggcaaacctgagcaataaaggtgagtcaggtctgccgtggggcaggcctctgcgggtgctgccctctatttttctcataacagaagggcactaccatgacaacgcattcccaccatgacaatgttgaaaagcagtttggttcacaggcgaacgcctatttacatagcgccgttcacgcagcgggtcgtgacttagtgcggctggcgcaaaggttgtctgatttttcccacgcgagcgtactggatatgggatgtggggctggacacgcgagttttgtcgctgcgcaacatgccaactcggtcgtggcatacgatttatccgccagcatgcttgaggttgtcgctggagcggcggaagaaagacatttaagtaatattactctccggcaaggctatgccgaaaaactgccctttgaagatgcatcgtttgaggtggtgattagccgctattccgcgcatcactggcacgacgttggtcaggcattgcgtgaggttaatcgtgtattaaagcccggtggcgtgctgattatcatggatgtcatgtcgcctggacatcctgtacgcgatatctggctgcaaacggtggaggcgttacgcgacacgtcgcatgtccgtaactattccagtggcgaatggctggcgatggtcaataacgcgatgctggtaacgaataccgtgataacagatcgtttatcgctggagtttcgctcatgggtaacgcggatgcgtacgccagcgccgttggttgaggcgattcgattatatcaggcgagcgccccggtagaggtgaagcgttattttgagttgcaggatgacggttcgtttagcagcgatactatcatgctggaagcgcataaagcggtatagcaatttaaaaggcgccgggggaagcggcgccttttggctttttcgtcggacaatatcaggagtctggcgtgctattgtccttcacaaacaacgtaagctgatcgcccggttgtagattatccgtatcatggttccagcgcatcacatctttgatattcaccccgtgacgtctggcgatactggaaagcgaatcgcctttacggacacgataggtaatgctatcgctattgtttgccagtcgttgcgcgctgctgccagcgcccacggtcaggctttgcccgattttcaggcgtgaaccacgcaggttgttccactgctgcaagtccttcgtgcttacgccaagccgcgaagcaataccggaaagcgtatcgccagagcgcaccttatagctacggctattcaacggcgtattgtcggcgatcagttgggactgaacggcgtcaatctcaccggaagccagcgactcacgcaactgctcggcatgctttttgggcaccataacatattgcggaccgcttacgcctaaggtagacccttttacaccggcattaaacgtcttcagcttgctgatagacatgcccgccatatccgcaacctgcgccatttcaactggactgtttaaacgaactcgtgccagcgctcggctttcatctgttgttggcagacgtacgccgtagcgtttgctgtttttgagaatttcactcaatgccagcatcttaggtacgtagagttttgtttctctgggcaaagaaagcgaccagaaatccgtcggttttccacgcgctttgtttgctttaattgcccgcataacacggccttcgccgctgttatacgctgcaacggttaacagccagtcgccgtcaaacattttgttcagacgctgcatcatgtctaacgcggcggtcgtagaggctacaacatcgcgacgcgcgtcataattacgggtctgctttaaaccataattgcgccctgtgctcggtatgatctgccagatgcctgcggcattggcgccagacgttgcgtgaggatcaaaagcgctctccactatgggtagtagtaccagctccataggcatgttacgtttcttaacctgccccgctatccagtacatatacggctctgcccgtaaagttacatcgtggagatagctcttattgcgtaaatacttctgtttctgttcgcgaatccggctgttttccggaattcccatctttagctcgtcgccaatgaaagcccacaagtcctgatctggcgcgatagacgttccgtcgtccatccatcgtgcctgactcgtaaactttcctgcttccccttgaccagctgcagaaaggctctgtgcgtgctgttggacgttgccagtgttctgagacgtctggcaccccacaagcaggacagaggcgagtaatatcgcttttgccttcatgtgtgtgtcaatagttgcttaaaagacgaccgatcataacggcgaagttagcgaatgacaagtaagaattatcagaacgtgtctttctttgaccttaaccatgcaaaacgcgcttctggttgttgcaatattgtttctttgtttatttcgttaattaaatcaatatcttcagttcttaaaaaaagattaatcttacgctcatttttaagaataacgggtaatgtcatttgtttttttacacgtaactctttaactttacgataatattcatttatgaacgaatcgtgcggaagtatgctcaatgcgaacttaatgttagctaaagtgtattcgtgagcgcagcaaatgagcgtgtcgtcaggcagagagttaattttcataagtgactgatacatctgtgatggcgtgccttcaaacagtcgaccacagccgccggaaaacagcgtgtcgccgcagaataagtaagggcggctaaagtaacagacgtgtcctaacgtgtggcccggcgtggcaaaaagagtaaatttctcgcctaaaacgcgaatagtatcgccatcgccaacaagatgggttgctcccttgtcttgcgtttccgccggtccataaaccgtcatttgcgggaagtgttgcaacagctctttgactccgccaacatggtcgtgatggtgatgcgtcaaaaaaatcgcctccggcatccacttatgttcagcaatggcctttaagacgggggccgcttcgccgggatcaacaatcacacagcggccttcatcattggtcagcacccagatgtaattgtcctgaaacgcgggaatactgttaagattcatatattacctctcaaataattagcggaaggttgcgatgaaaccggcaaggctctctcaaactgtcgttgcgcccggatgttggggtgagttgccctggggcaattactaccgtgaggcgctggaacagcagctaaatccgtggtttgcaaaaatgtatggtttccatttgcttaaaatcggtaatttaagcgcagaaatcaattccgaagcgtgcgcggtctcccatcaggtgaatgtttcatcgcaggggtcgccgatgcaggttctggccgatccgctacatcttccttttgcagataaatccgtcgatgtttgtctgctggcgcatactttgccgtggtgtaccgacccgcaccgtttattgcgggaagccgaccgcgtattgattgatgacggttggctggtcattagtggatttaacccgctgagtttgatggggttacgtaaactggtacccgttttacgtaaaacaccgccctataatagtcggatgtttacccttatgcggcaactggactggctgtctttactcaatttcgaagtgctacattatagccgttttcatgtcttaccctggaaaaagcagggggggcggcttttaaatacgcatatcccggcgctgggctgtttacagcttattgtggcccgtaagcggaccatcccgcttacgcttaatccgctgcgacataataaaagtaaaacccctatccgccagaccgttggcgccacccggcaatatcgcaaaccggatggctaagcttccgcctggtagccactatcttcctgcgtgggattcattgccgcggcgcgcgccagttcatcacaacgctcgttttcgggatggcctgcatggcctttgacccatacccatttgatctgatgctgacctaacgcagcatcgagacgtttccagagatcgacattttttacgggtttcttttccgctgttttccagccgcgtttcttccagttatgaatccattgggtaattccttgccgcacatattggctgtcggtgctcaatgttacttcgcaatgttcttttaacgcttcaagcgcgacgatcgccgccatcagttccatacggttattggtggtcagcgtgtaaccttcactaaacgttttttcatgaccgcgatagcgtaagatagcgccataaccaccaggccctggattccccaggcaagagccatcggtgaaaatttctacctgtttaagcatctctggtagacttcctgtaattgaaatcgataacaaaacgcaagtctgacataaatgaccgatatgagcactgcaattacacgacagattgtcctcgataccgaaaccaccggtatgaatcagataggcgcgcactatgaaggtcacaagattattgagatcggtgcggttgaggtgataaaccgtcgtctgaccggcaacaattttcatgtttacctgaagcccgatcgccttgtcgatccagaggcttttggcgtacacggtattgccgatgagtttctgctggataagccggtttttgctgatgtggtcgatgagtttcttgattatatccgcggcgcggagctggtcatccataacgcatcgttcgatatcggctttatggattatgagtttggtctgcttaaacgcgatattcctaaaaccaatactttctgcaaagttaccgacagcctggcgttggcgcggaaaatgttccccggcaagcgtaacagccttgatgcactgtgttcgcgttatgagatagataatagcaaacgtactttgcacggcgcattgctcgatgcccagatccttgctgaagtgtatctggcgatgacgggcggacaaacgtccatgacgtttgcgatggaaggagagacgcaacggcagcaaggtgaggcgaccattcagcgaatcgttcgccaggccagccggttacgggtcgtttttgcctctgaggaagagctggctgcgcatgaatcgaggcttgatctggtgcagaaaaagggcggaagttgcctttggcgggcgtaatttattcctttttaggctataaaaatcatccttcgggcgatttttgcagcaactgattcaaaaggtgagaaaaagcgttgacgggcgacaccgcaaaccgtaatattcgcctcgttcccagcgggaacatcacggagcggtagttcagttggttagaatacctgcctgtcacgcagggggtcgcgggttcgagtcccgtccgttccgccagatacaaatctcagggtgtttttatacatcctgtgaagtaaaaaaaaccgtatcactgtaaaagggatacggttttttttcgtcttcaagaagttccaccgtctatcgtggaatctggcgcaaatgggcctacgcctggatgacgaacaggatattaccgccacttctttcactgtcatggctattttgatcccactgacatttaaggcgcggcctcatggcggtgcttaaccgggatcgggacatgttcagcgcagaagcagactgcgtaatgttgatatcactcagataattacggagaaccgccagacatgcgcatcatcactccagggcatcccacttctccagcaactccaccgggatctcattgatcacctccgagaaccgttttcccaccagtctttcagcctggcgtaacagtgggatggtcgggctactgggttcactgctctcaaaccagcgacgaatgcaccgcaggcgttccagcgcatcattacgatcgcgaattggccccggttcagcattgtgtgggagggatataccgggtggcgcgttgacaggcggcacatcctctgcccgtgccggaacggcattatccataaccgtgcctgcggggtctggcactggcgctggcgacggagggatttccggtgtggttgtctgtaccacgtcaggcagcagcgctaacaactgccgcaggcgtgaaaaatctggagccagatcgcctaatgtctcacgcgcccacacttgcaggcgttctgcgctttcctgcgcttcgcgaaacgccgccagcggtaatgccccacgggcttcgaggtcggccagttgctggcggacggattcgggggccagcgcatcagccgggcggggagcggataacgcgcgctccacatcccgtacctgtaggcgcagggcggcactgtttgacagcgtaataccgcgaatgtccgccatcacgccttcgtgatccagcagcgccgccagggcattactgcgcgccagcgacgcatcttcaatagattctgcggatgcgccttcgccggtaagcagctgtggatggagtgcatcagaccagattacgctcagttctgccagttgtgtgagcatttccgccagtccctgtgcgccagcctgctggatgcgactgcgcagcagcaggatcaacacccggatatccttactgcgcgtgagcagacggcgcgcatcacgttcaatttccggccagttcacggcttccggcgtactgacaaaatcaccatattgcgcctccgcctggggggcggcgcggctgaacagcagcaggtattccggatcgtactccggatcggggccgcagggttgttccgcgcttaccggtttagtcagggacatgtccatatcattactctcagtgggttaagccgtgttcaggttcaaaaatcatgccggtcaccggacggtcatgcatggctttacctgcccaggccgtccagccaagccgctgcgcgccgccgatcaccgcaggcggtgcggcatgaggcttcaactgcagctcaatttcccagcaatattcaaaaccgatgaacgtacgcaccagttctgtcagcacgggcagattgttgccgccgggcagaaaacgcaggtaatcctccagcgtgagcgggccgataattagccggaatttgtactgcatatccggtacggcctggccgataagcgccccgttgcccagcaccgaagactgcgcgggcgtgcccagacgggtgatttcatcgttcgccaccgttatccagtgcagggcgaattctttcaccgcaaaaggtacgctgaaatagtgcgccagcgtggcggccagcccgtcaggattgcgcgattcgcgtaccagatgggcggaggctgccaggcgaacatgatctgacagcgggctttcggcgctttcccgtagatcctgcccgctgagactggcgatataaaacgcaaaacggtcgtgttccggtttgtccagcccgccaccagcggactgggcgctgcgccatgcctgccagaactgcgtcagccagcggtggtgaaaaatattggaaaaatgaaccagcgtcggatcgtgacgactctctgagcggttcagtgccagctcggtatagtgcagcggcaacgggccgtttggcccccatagtccgaggctgtacaggctcaggtgcaggcgtccatcctgccagctgacctgggcgatttcccgtggcgcaaaggtcatcgtcggcgtctgtcccagacggaatttttccatccgtggctgccagatactgcctgccggagtatcacagagctgggcatccacgcgccgcatcaggttcaggaatccgtaacgccagggggttttctgcgcctggttgagagcgccggtcatacgctcccccgttgcccggttctgaccggccaggtcatgacatgcccgcgttgcatcgagtgcagcgtcatctgcgagaaggtattaatggaaacatggcgggcaatatagtgttccagcaccagaccgaacaggtaaggactgataccggaaaatccttcttcgtccacggtcagttcgcaactgacgccccggccatagaccaacaggccggagccgggcaggcggcgggtcaccggggtggttttgcagccaatcaggctgcgcacctggcgcgactgcgggctgtcgtgagccgggataaacagattcagcagatcgcgcagcgcctggccgccggtgcggtgatccagatcggccagcggcagataattaaacgacaactgccggatcagccgccaggccatttcgcgttcagccagcggcggctgcggcgggcgcggcggtctgataagacccacgcccgccaccggaatcgccgcatctacggtcagatcatcccggccattacgtggaataaggcagggcagatcgcggttagtcaccattgccgtgacggtgatatggcgcagattttccgggtagggcgcttcatgctgatcaaccagcgagaggaagacttccgagccggtatagggggttcgggtgccatagcggcgggcgttttctgacgagcggcgcggttcacgacgcagtgaaaaataacgcccgtggttgccttcgtcattattacgggtgtgatacagcggacgaaaaatcatcttccgtgtggtttccgcttccaggccttcgacttcctgaacagaaaacacctcgtaatccagcggacgggtacgatccaccaccagatgctgttccgtcacgctgtgagtgacttcaatccgggtggtggtgcgaggaagcaggttgatcaccggcgtacagaacaggctgaactgtgcagcgtccgtctgatgaatcagccagtccggcggcaggcggttaagcagtatgacaatttccgccacattgccctgcaccttttgtaacccggcagacaatccggtcggggtgaagaagtaaaaccgttccggacaggcgaaaaattcatgcagcagattatggccgtgaaacacgttccaggcgagcggtagcagcccctgccctggctccagcccttcgtgcgccaccgggtgttgaagattcacattcagttcgccgtcaaagtgaccgggttcaccggccagtgtggcgacggcgctggtatgtagcagctcaaacaggtgtgacgcaatgcgttcttcgccgcagaggtaaaagggcagccgtgccggaccggccagctcgctgaaagtcagttccccgaaggttcgcagggtgatgcgcaatgccccggcgacatgaatattaggcggcagatagcggtgcagggcgggcatatccggcggcgcggcggtcaggcgtacctcctcgatggacagcggccacagcgtgacgtcctggctgctgcgaaactggcaggcggtattttcgccttccgggatgggggaaacgaacgcggtatcgcgcggcacggtgacccctttcgccaggtcgccttcctgcgtatcgggatacagctttaccactgccatcgatggcgtgggggtgacgtaattggggctgacgacttccagtaaccgctgtgtgaagcggggaaactcggcgtcaatttttagctgagtgcgggcgctcagaaagctgaacgcctcgatcatgcgttccacatacgggtcggcaatatcggttccctgcatccccagtcgggcggcaattttgggatggagggtggcgaactcagcaccggtctcccgcaggtagctcagttcgcggttgtaatactccagtagccgtggatccatgaataatgccctgtattaaaagaacgtaatgcggctcagctccatatccagcgcgctgcgtaccagaaactccgtgggatacggctgcgtcagaatttgtccgcgaatttcaaactgtagcgtgttatagctaccctgccgggttttatcgagcaagggcgtgaccctgagtgtggcggcgttcagccggggttcgaaacggataatggcgcgccggatcgcctcgctgatatcgtcccacttatgctcatacataaagctgcccgccagcggcggcaggccatagttgagcactgacgccgccgcctgcggatagcgccgggcgtcgatgtcaccctcgtggctaatggtattgagcaaaaaggagagatcccggcgaatgatctccttcagttgtaccggcgtgacgctgatatcccggtcaattttctgatacggagcattgtcacacagccgatcaaacagcgtgggcagcaggtggttagcgggtgtaaaacgagacgtgctcatgcgccatcgttttcctgagcatgaaaggtacaatgggccatgtccagcaggctgatatcgccgtggctggtcagccacactttctgccccagcgcccgcacggtggtttcgccggggccgtcctgccaggcggtttccctgcacagacgcagggcgtcggatgcactttccgaaccgctgtaacgggtaaagagccaggcgccgtgcgtatcgccattcaccagggtgatattaacgggtttccacagcagatcagtcaggcgcgtcggttgcggcgattccagcgagcgtatttgcgaaaacggcagccagatatacacgccgccggtgactagctcaagtaccgggccaaggcgggaatcgctgtcgctcgcccagtcaaatgcgccgccgttccactgcccgcccgtgtctgttatggcttccagtgcggtattacggtgtttatcaacctcaccggtatcgtcatgacaggcgagtgccgccagcagtgactccacccaaacgggctgcggcagaagaaaaccgggtcgttgttcaccctgaaaaacggtgtggcggaacatttcgcagcgaaccagctcccggtacagccgggcctcctgggtataattggcctccatcctggcgcatagctgaagctggtgtagcgcccgcgaccagtctccggccacacacagcaactgaaacaggctgtggcggcagagcgctttcgccggattttcccgaacctgctgctccgccatctgaatcccctccgcaatagagtattcctgtatcagcgcggacagggtagcaggaagcgtgtcagtttttttcatgggcggtatttccatttttctgtgtcggagtgattcggtagtggctatcgatgccaataatacgatgctcgcggcgggtcagatcgggcagtatctcgctatgtgcggttttcccccccagttccggcgagagcagttgcaggatatcgggcattgattccatcgccagccagtgcatttcaccctcaccggtcgtgtccagcgtatccagaatggcatcaataccgggcgcgcctgccaccatatcctgtaacgtgtcggtgtcgccctttttatcgtataacgacgtcaaatcctgggtgacagcgtcttcatttcggggaaacggtttagcacggaggggcttttcctgcccggagggccgcaatgcctgctgatattcctggtaaagctggtgtagtgtgctatccgcttcatggccagtgtaagaggatgcggtttcccggacgggaataatatcgaacgggttctgcggattgagctgttgttgtttaaaccagtccagatccaggtactcagcaacggattcagatgactgaaccaactgaggaaacgaaacatcgggacgggactcatcattggtgcgggcaaggcaccaggatgacagaccccattcaatcgtatctccatcattcagccgcatacggtgatgaggttccatcacctgctcattgacggcacagcacagttcatcagagtgattaacaatccaccacgcctcttcgtggcgaacaagactgagcgcgatatcgtctttcccatgttgctcaaaaagcggaatgtagggggcggcggcagtaaatacgatgtatgtccctgcgggatactgtgcgttatccgttataccctgcgactgtattttccgtaattcccacatgtcttgtttcattatgtcccttaaatgtatttatttttctggaggaaacgtttagggagttttaattcataaataattttaactaaatttatagggagtcattattgatgacaccctttttattattttcgtcgtgaatgcattgttgtatgcatagatgtcttttttgaaatattatttcttttaattctgcaattgcgatttttatcttgctgttcattgattatttaatattaacggcttagttgctaattagtccctgatctgtatcattgttttgtttcgatattttttcgaggctatcaataaagaattgtttatatatttatatgcattgatgcattatttttatgaatttttatgtcacaaggcataacacatggaaactcctgtttcacgcagtgcgttgtatggaaaactggccggcccactattccggtcgctggaatcggcaacggcattttgcaaactacgctctaatccctgggttgagctgactcactggctgcaccagttaacacagcagcccgataacgatattctccacgttcttcggcattaccagatccctctttctgatgtggagaaagcgttactccggcaactggatatgctgcccgccggggccagcgccattagtgatttttctcaccatatcgatctcagcgttgaaaaggcctggatgctggcgagcgtccgttacggcgataacaaaattcgcagcggctggttgctgctggccttgttgaccacgccagaactgcgtcgggtactgagcagtatctgcgcgccgctggccacgcttccggttgatgaactgacggaaatactgccctcgttgatcgaaacatcgccggaagcgcaggagcgcccttacgacggctccggcctggcatcagccattcccggtgaaagcagtcaggcgattcccaacggcgggcaggacggtaaatccgcgctggcaaaatactgtcaggacatgacggcacaggcgcgcgacggcaaaatcgacccggtgacggggcgtgagcatgaaatccgcaccatgacggatattctgctgcgccgtcgccagaataatccactactgactggtgaggcgggcgtcgggaaaacggcggtcgtcgaaggttttgccctcgcgattgcgcagggggaagtgccgcccgcgctgcgggaagtacggctactggcgctggacgttggcgctctgttggccggagccagcatgaaaggcgagtttgaatcgcgtctgaaagggttactggaagaggccgggcgctcgccgcagccggttattctgtttgttgatgaagttcacactctggtgggcgcgggcggcgcatccggcacgggcgatgccgctaacctgctgaaaccggcgctggcgcgcggcaccctgcggactatcggcgccaccacctggagcgaatacaagcgccatattgagaaagatccggcgctgacccgtcgttttcaggtgttgcagattgccgaaccggaagagatccccgcaatggaaatggtgcgtggtctggtggatacgctggaaaaacaccataacgtactgattctggatgaggcggtacgtgcggcggtacagctttctcaccgctacattcccgcccggcagttgccggataaggccatcagcctgctggataccgccgcggcccgcgtggcgctgacgctgcacacgccgcctgccagcgtacagttcctgcgccagcagctaaaagcggcggaaatggaacggtcgctgttgcagaagcaggaaaaaatggggattcagtcagatgagcggcgcgatgcgctgatggcgcgaattttctcgctcaacaatgaactgactgcatccgaatcccgctggcagcgggagctggaactggtacatacgttgcaggaactgcgtctcgcagagtctgatgctgatgacaaaaccacgctgcaacaggccgaaacggcgctaagggagtggcagggcgacgcgccggtggtgttcccggaagtcagcgcggcggttgtcgcggcgattgtcgccgactggaccggtattcctgctgggcgcatggtgaaagatgaggccagccaggtgctggaactgcctgcccgactggcgcaacgcgttaccgggcaagacggcgcgctggcgcagattggtgaacgtattcagaccgccagggcgggactgggcgatccacgcaaaccggtgggcgtgtttatgctggccgggccgtccggtgtcggtaaaaccgaaaccgcgctggcgctggcggaggctatctacggcggcgagcagaacctggtaaccatcaatatgagcgagttccaggaggctcacaccgtttccacgctgaaaggcgcgccgcccggctatgtgggctatggcgagggtggtgtgctgacggaagcggtgcgtcgccacccctggagcgtagtgctgctcgacgagatcgaaaaagcgcaccatgacgtccacgaactcttctatcaggtgtttgacaagggtgggatggaggacggcgagggtacacatgtcgatttcaaaaacaccacgctattactcaccaccaacgtgggttccgacctcatcagccagatgtgtgaagatccggccttaatgcccgatgctacggggcttaaagaggcgctaatgccggaattgcgcaagcatttcccggcggcatttctgggccgcgtgacggtgatcccttacctgccgctggacgaaacgtcgcgtggcgtgattgcccgtctgcaccttgaccggctggtggcgcggatgagtgaacagcacggcgtgacgctgacgtatagcgaggaactggtcgcacatattgtggcgtgctgtccaatgcatgaaacgggcgcgcggttgctgattggctacatcgaacagcacattctgccacgactgtcgcgctactggttgcaggccatgacggaaaaagccgcgatcaggcagattgatatcggcgttaatggtgatgagcagattgtttttgagatcgtttgctgaaaccggccgttcgaagtgtccgtagtgcgattttaaaaactgtaccggtataccgctccccttgcggcaaccagttgactaaaaaggaaatgaaggattatggctatcaacaatagcgcgcagaaattcatcgcgcgcaaccgcgcgccgcgcgtgcagattgaatatgacgtagagatttacggttccgagaaaaaaatcgagctgccgttcgtgatggcggtgctggccgatctggccgggaaaccgcgtgaagaactgccgccggtgacggatcgcaaattcctcgatattgatattgataacttcaatgagcgcatgaaagccattgcgccgcgcgtggcgttcgctgtgccgaatacgctgacgggtgaaggtcagttgatggtcgatatcacgctggaaaatatggacgacttttcgccggcacagattgcccgcaaggtggacgccctgaaccagttactggaagcccgcactcaactggcgaacctccagacctacatggatggcaaggcgggggcggaaaatctggtcaataaactgttgcaggacccgactctgctgaaaacgctggcgaatgcgccgaaatcggccgctacccagcaagatgtgtcagcggataatgaatcagcggaataacgtcgaatttttaaggaattttcatggcaaacagtaatatgcaggcaaccgacgcggttgctcaggataccgcctccgcatccggtgaatttgatgcgttgctgaatcaggccttccgacccaagactacccaggcggcaaaagccgtggaagccgcggtgcagacgctggcgaacacgatcaccgtcagcgatgacgcctataaaagcatcagcgctattattgcgcagatcgactttaaactgaccgaacagatcaaactgatcctgcaacatcccgactggcagaagctggaatcctcgtggcgcggtatggagcatctggtttacaacaccgagaccgacgaaaagctgaaaattcgcttcatgaatctgtcaaaagatgaattgcggcgcaacatgaagcgttacaagggcatcgcctgggatcaaagcccgatgttcaagaaactgtatgaagccgaatacggccagttaggtggcgaaccttatggctgtatcattgcggattactacttcgaccatacaccgcccgatgtggatctgcttggctctatcgccaaagtcgccgcgtcggcccatgcgccgtttattgccgtggcttccccctcggtactgcaaatggactcctggcaggaactggcgaatccccgcgacctgaccaaaatcgtcacccagaacctggaatatgcgccgtggaactcgctgcgggctagcgaagactcccgttatattggcctgacgatgccgcgttttcttgcccgcctgccgtatggcgcaaaaaccaacccggtggacgagtttgattttgaagaagatgcggatggttctgaccataccaaatacgtctggagcaacgcggcctacgcgatgggcgtaaacatcaaccgttccttcaaacactacggctggtgtacgttgattcgcggtgtggaatcaggcggtgcggtggaaaatcttccctgccataccttcccgactgacgatggcggcgtggacatgaaatgcccgaccgaaatcgccatctctgaccgccgcgaggctgaactggcgaaaaacggttttatcccgttgatccaccgtaaaaactcagactatgccgcctttatcggcgcacagtcgctgcaaaaaccacaggaatactacgatccggacgcgacggccaacgctaacctgtctgcccgtctaccgtacctgttcgcctgctcgcgcttcgctcacttcctcaaatgtatcgtccgcgacaaaatcggttcctttaaagagcgtgaggatatgcagcgctggctaaatgaatggattatgaattatgtcgacgccgatccggtgaactcctcgcaagaaactaaagcccgtcgtccgctggctgccgctgaagtagtggtggaagaggtcgaaggcaatccaggttattacgacgcgaaattcttcctgcgtccgcatttccagcttgaagggctgacgggatcgctgcgcctggtgacaaaactgccgtcagtgaagcagggcaatgcctgatatatattttgtgaatgtttaagcgagtgaagtcagagaagatagagaatataaagagggatatgaagaaaagaatttcgtctcgcccacggtctcgtaaaggtggggtacgtaatgatgacacatatccgaatgccagtaacaatgccgaagctttttatatcattgagtaggaaatacatattatgaccataagcccaacttttcatctgttacctggtattgttctgctcttttcacaatatgctgtagcctgggaagtcagttgcccggctgttattgatactcagtcttctgctgtgagcctgaagtctgatgtcccagcggcgtggcagctttctccccgatatatgtcgcgtttatggttaagtagtattggggtaacgcagggtaaacctgaaaacctgatggatctcaaaccagagactaaaaaagtaaacggtgaaaattggtctgtatgggaaacagaacgtggtagcgataaagaaaccgatcgctattgggtttcgtgtatttatggtcatgaacagatatggttgacgcaaccaatacctgcttcttctactcgctgtaagactcgtaattttgagggatcgccagaagaccagtctgtatcttttatctgtaattagcgatttgagacgtgaaaatttcagtacaggttatggtttttattatcggaagttatgaagcattatttatatgcattaaataatgcaaattcataaaataactaaatacattatcggtaccggaaaaatatacagtcctctgttctcctgaagttattggagaaggattctgtacggcaatgatttatctataaacaaaaagatatagataaaatcaggtttattttaagtaaaacttaataaggatataaaaatggcttatgacatttttttgaaaattgacggcattgatggcgagtcaatggatgacaaacacaaaaatgaaattgaagtactgagctggcgctggaatattcatcaggaatccaccatgcacgccggtagcggcctcggctccggtaaggtctccgtcaccaacctggattttgatcactatatcgaccgcgccagcccgaacctgttcaaatactgcgcctccggcaagcacattccgcaggccattctggttatgcgtaaggctggcggcaatccgctggagtacctcaagtataccttcaccgacctgattgtcgccgtggtttccccgagcggcagccacgatggtgaaatcgcctcccgtgaaacggtggagctctccttcagcaccgtgaagcaggaatacgtggtgcagaaccagcagggcggcagcggcggcaccatcaccgcaggctacgacttcaaggccaacaaagaaatttaacggctgtttttccggccagatgttatgtctggctggttttattgttttgattttaaaggaatttacagtgaataaatggcgtaaccccactgggtggttatgtgcggtagctatgccttttgcactgctcctgctttccggatgcggcagtagcgattcgctacttgacccctaatcgcagcggcctggcctgagcgtgaaagcgttttacaaggtgaattctgacaatcagaagaaagcggcgtccatgaagatacgtgttgagaattaatgacctacacagaatttttagaggttaagcaaaatgaacagaccttcattcaatgaagcgtggttagcttttaggaaggtgaatcattccgtcgctgatgtgggtagcattattggtggaaacgttgggaaaaatataactggtggttattttcaaaatgcctgccctattcgaatgagctatgttttgaatgcgacagggttcccaatagcccgtaactctccgtatgcaaaggttagtggtgccgataataaattctatatttatcgcgtgaatgatatgattgattatcttactcatactatgggcaagcctgatcttattgttaataatccgaaacagagtgactttatcgggaagaaaggaattatcgtagtaaaagggcatggctggagcaatgccagaggacacgttacattatggaatggcagtatctgttcagatcagtgccacttattaaatgacccagataatggaccatttgttcctgaagttgggacactgtggatactgccgtgaaatggttaatattagttactttcagcataagtggaatgctggtatggcagccatcctttgcacaagaagcattgaccacacaatattcacagtcggaactcttaaaaaattgggcgctgagtcattgtctggcattagtatacaaagatgatgtcgttaaaaacgatgccagagctacggccagtgcttaccttgaatatggtaaacaatctgtggagatttaccatgaaattgatgagattgcgaaaaaatattcagggttgaaatataacggttcgatatcatcagattttaataccatgaagtgcatagattttatccatgacagggaattaaatgaattaattaaaaggcgtgtcgagaagtaaaattcaaagatattaaaagcatacgttctcttgctctgatgaatttatgggtaagaaagagctgtacaggaatagttaatctgttcacctaataaagcagataaatcagggcttaatttaggtagttaaaaggatagtagatatgtcttatgacatttttctgaaaattgacggcattgacggcgagtcaatggatgacaaacacaaaaatgaaattgaagtactgagctggcgctggaatattcatcaggaatccaccatgcacgccggtagcggtctcggttccggtaaggtctccgtcactaatctttcatttgaacattacatcgatcgcgccagcccgaacctgttcaaatactgctcttccggtaagcacattccgcaggccattctggttatgcgtaaggctggcggcaatccgctggagtacctcaagtacactttcacagatctgattattgcaatggtatcgcccagcggaagccagggaggggaaattgcgtctcgcgaatcaattgaactctccttcagcaccgtgaagcaggaatacgtggtgcagaaccagcagggtggcagcggcggcaccatcaccgcaggctacgacttcaaggccaacaaagaaatttaacggctgtttttccggccagatttatatctggccggatttattattttgattttaaaggaatttacagtgaatgaatggcgtaaccccactcggtggttatgtgcggtagctatgccttttgcactgctcctgctttccggatgcggcagtagcgatgcgttacctgacctcgaatcacagcgactcgacctgagcgtgaaagcctccgataaggtgaatcctgacaatcagaagaaggccgcgcccattgagatacgtgtttatgaactgaaaaatgacgccgctttcacgacagctgattactggtcgctccatgacaacgacaaatccgtccttaccgacgatttagtgcgtcgcgacagctttattttgcgtcccggcgaagagaaaaaactgcgtcgcccgctgaatgcgcagaccacggcaatcggcgtactggccggataccgtaacctggccaaatcggtctggcgggtaacctacaaaatcccggaagccccggaaaaagcctggtacagcagcttcatatcggggaaaggaaaagtgcagttggaggcggaactggaacaaagcgccattgtaattacggaacgggataaatgaattatgagctggaatgaccgcgtagtctggagtgaaggacaatttttactgccgcagatgtttcagcagcaagagcgttatctggaacacgtcatgcattaccgcagcctgccgctgaccccctttttctggggattcagccactacaatattgatggcgaagcgctgaacatcggtaaactgatactgaaagaggcatcagggatttttcctgacggcacgccgtttaacgcaccggaccacaccccgctgccgccgccactgaccattctgccggagcacctgaaccagcagatttgtctggcggtaccggtacgcgcgccgaacagcgaagaaaccacgtttgacaataacccggaatcattggcgcgtttctcggtacatgaacacgacatccgcgacgccaactcgctgggacgtggcgcgcagttattacagctcagtcatctgcgcctgcggctgctgccggaaaaggcggtgacgggcgcctggattggcctgccgttgacccgcatcaccgggttgaaccctgacgggcggatagatatcgaccacgacctgatcccgcccatcattaattatcaggccagttcactgatgtgtacctggctgtcgtggatcaacgatctcatccggatgcgggccgattcgctggcggaacggctgaccggcagcgacaaccacggccatgaagcagcggaggtctccgattacctgctgctgcaaattctcaatcgctttgagccgctgctgactcacctggcgaaaaccccgctggccccggaggtgctgtaccgctacctgtccgaactggccggggaactctccacctatgtgcgtccacaaacgcgacggcccgctgaatacaaagagtacaaacacctgacgccctatgccgggttgaaatcgctggttgatgaggtgcagttcctgctgaacgcggtactgatccggggcgcgcagcgcatcgagctgaaagaggggacttacggcatcctgaatgcggtggtggccccttccgatcttgccgatttcagcacgctggtactggcgataaaggcttcaatgccgaccgatgtgctactgcaacattttgccgcccagaccaaaatcgggccatccgatcgcctgccggaactgatccgctcgcatctgccggggctggctttgcaggttctgcctgtaccaccgcgccaaatcccgtttcaggccggatacatctattacgacatccgccgcgagggagcattgtgggaacacattgcccgttacggcgggatggccatgcataccgccggggaatttccggggctggagacagaactgtggggagtgcgcgataaatgacagacagtaccctgacgccgccagcggcggatatgatgtcctttttgtccaccacgccggaacataaggacagtgaatatgaaacgccggtacacaccagccagcgcacggaactcaatgtcatcgttgaagacggtccggacagcaaactccggctggctgaaatcagcgcggcggctaacccgttgctcgccgctgcccggcctttattgtgcgctctcgcagccatgcccgctaaactggatgcggccctggtagagccttaccgtaatctgctggtacgcgagatgcatctgtaccagacattatgcgatcaggcgaacctgcggcgcgagcacgtactggcggtacgttactgcctgtgtacggcgcttgatgaagccgccaataacacaacctggggacggcgcggcgtctgggccggaaaaagcctgctggtaacatttcatggtgaaagcgaaggcgggataaaacttttccagatcatcgggcgtctggcggccagcttccaggagcatggcaacgtactggaggttatctaccacctgctggggttgggatttgaaggccgctacagcgtgcagccagacgggcgtaagcaactggacaatattcgccagcaactgctgacacagctttcacagcgtcgcgatccggttatgcccgcgctctcgcctgactttcagggggcgataagcggacgactgcggcggatgcgccgggtgccggtctggctgagcgccgggatagccctgttggcgatgctgacgctgtttggcctttacagccaccggatggatgtgcagaccgtcaccgtacaacagcatattgatgcgattggtataaaactgccgccgccgcctgtgccggttcataagctgcggctgaaaatcctgctggcaaacgaaatcgcccgtggcctgctgaccgtggacgaagatgaccagcacagtagggtggtcttccgtggcgacgccatgtttgtgccgggacagaaaacggtgagtgacgcaatccggccagtgattaacaaagcggcgcgggaaatcgcccgcgtgggcggcgcagtcactgtaacgggtcacactgacagccagcccattcattcggctgaattcccatccaacctggtactgtcggaaaaacgggcggcggaagttgcggcgttgctgacctccggcggcgtacctgccggacgggtacatatcgtcggcaagggcgatacggtgccggtggcggataacggcagtaaagccgggcgggcgaaaaaccgtcgggtggaaattctggtagtggagtgaatgaatgatgaaaaaatcaacctatgatgtgtctcatcattcggcagtatgtggcgtgacgggggattattatcggatctcagcgacatatcacataacacgatctgttcgtgtttttttgatcatcttatgttgcctgttatccggtggcgcttttgccggatccccgattaacgcaggattcatttcccccgataatgtcaacctcagtactcaggatttcctgaaattttatgccactgacaacgtacagaaaaaagacaatgcactgatgtatatgctgggggtggaggatgcgacagaaggtaaagcctggtgtggatatggtcaggttgacagtataacaataaaccatactgtgctgacctggtttgaacagcacgcagtgaaaaagcctgatgtaagggcttcaatactaatagaggaagcattagttaaaaattttccctgtcagaggacagactcctccataaaaattgcttcccggtcatctcccattttatccctgacgccggatgcgcttaatctttcaggtaatgacttttttaaattttgggtgtctggtaatcaacgggataaactcagggcgggtgtctatctgctcggcgtggaggatgcgacagagaacaaactgtggtgtggatacgctttatttaagacgctaacattaaatgaattagtctatgtttctcttaaaaataaaaccaatgaggaactgaattctcgcgcggctgaacttatcataaataaattaatagagtatccctgtaatatataaaatcattcaagttgcatcaaggcggcaagggagtgaatccccgggagcgtacattagttcgtgactggggtgagcgaggaaagccaacgcacatgcagcctgaagtatgacaggtataccctgtgataatgttatcgctgccagttcagataaagtcttggtggtaaagtcttggtggtaagatattgatatgtttaaggtaatggtctgtctgttggtgggtgttcctgccatttcttatgcgcacgattatgggtgtgctacggttggagcatcaatggagtcatcattatttgatgccataaaaaatgacctgaatatagatgtcgctactattataaaggataaaacaaaggtagagattcttgatatctcacctgtatctaaggtctatgcagaatctctggccaggatggattatgaaaaagataaggccaaaaataaagtggcaatattagataaaaaatcctatttcgatagttactatgaaaatcaggttaaatctatcgtggcaaaatatacctatattaacaaagataaagaaaaagatattttcattgcatccagcttcatgaatgctgatgagtgttctgtaagatttaatggttatattactttatccagggaattttaaaatattgattattgggtggcgagtcgaaatataatgcaaaaatttcttagtctgcttttttcccggcgcgcgctggcagttgtgggcgttctggttctggcgctgctggtctggtttgtcgggccgctggtgtcatttgataccctgcgcccgctggcctccgtgggtagccgggtagtgaccattgccctgttgctgatgctgctggtactgtggctggtcaactggtcgatgagtatcatcggcatcagtgtcctgtgcctggcgattggcttcgtcacaccgctgctggccctgggcgatgtccatccgtttgcgccgctgtgggtccgcctgaccctgattggtttcatcctgctgatgtacgcgctgtacggcctgtaccggctgtggcgtgcgctgcgtatggatgaacaactgctgcgtcgcttcctgcatccgcgcggggaagaggtaccggtggcaggcgagatcaaagccgacctgcgcaccgtcaaccatattgtcacgcaggccatccggcagctgcggcagttgcgggtggatatgcctggctggcgtaaaatcttcgagggaaaacgctttctgtatgagctgccgtggttcatggtggtcggcagtcccggcgacggcaaaaccacggccctgctgaacaccggattgcagttcccgctggcggagcaaatggagcagacttcgcgcatcctgacagtaccgggtggcggcacgctacactgcgactggtggtttaccaacgaagcggtgttgattgataccgccggacgctacgcccgccacgatgacggtggtgaagcgagcgccgcgcagcgtaacgccggagagtggcagggctttctcggtctgctgcgtaaacatcgccccggcgcgccgcttaacggcgtgatcctgacgctaaacgtggcggatttaaccgcacagtcaccggcggaacgcctggcggcctgcgccgctctgcgggcgcgactggcagaactgcgcgagaccctggggattcgctttccggtctatctggtggtcaccaaaatggatttgttgccggggttcagcgaatattttcgcacgctgaccagccatcttcgtgcacaaatctggggcttcacgttgccgtacagccgcaggcgaaaagcgggcgacccgcaggcgctgcacgccgcctgcgcgcaggagctggcgcgcctgacgctgcggttggatcagggactggatacccggttacaggaagagtacgaccttaaaagccgccagcggctgtataccttcccgcgtgagttcgccgccctcggcgagccgttgctggaggctattgaacagatcttcctcgattcaaaattcgatgccacgcaactgaataacacgctgcgcggggtgtttttcaccagcgccgcgcaggcgcaggccgacgccgtggccgaccagttgagtatctggcagcgctttgtccgggcgataaaaaccgcccgtggcgaatcctccgcctctctcccacacgctctgccggacggcaaccgcagctacttcctgcatgacctgctgacacagtttatttttcgtgaagcgcacctggtggagccaaacctccagtgggcctggcgttaccgcctgctgcgcctcggcgggcacctgctggtactggtgctggcattcctgttgtggcaggggatgcagaccagccagcagaccaacggcgactatctgaatgaaatcagcgcccgcgcgacccggctggacggtgatgtgaaagcctacaccggtaaaccggcgatggctcccgtcccggcactgctggacagcgcaagggaactgtccgcctggccggaactggacccggacgcgccgccgctggcctggcgctacggtctgtacagcgtaccgccggtaaccgacagcgtggcgtcgctgtacaaccgtctgctggatcaactgctgctgccgccgctggtgaaacggatggagtatgtgctggcggacgccattgcccgtcaggatagtaaagcggcctacgatgccctgcgcatctatctgctactgaatctggataaagatcacgaagataaatacaacgcggcggagatccagtcgtgggtgattaacgatctggggaacagcgacagcgtggccgggttcggcgggcgcgccgccgtgctgacgcatatcgaagcgctgtttgacggcagccgggtggtgcattcaccgtatgagaaagatgaggcgctgatccgccaggcgcgggcattcctcgacggtcacaccagtaccgagcgtatctacgcgcgggcgctggcggcaatggagagcgaagcgccgcaggagttcacgctggtacgcgccgtcggcgcggatgcgggaacggtctttgtgcgtagcaacggcgcgccgctggatcggggcgtgccgggtatttttacccgtgaaggataccgggagctgttcgacaaacgattaccggaatttgtggcggcggcgacggcgaacgatggctgggtgatgggccgggagagtacgccaaaaaagctgactgacagcctgcgcagccagataccggggcaggagcagtctgtcgcccgcgaagtccgccgtttgtacctgacggaatatgcccgccgctggcaggattttctggacagtatccatagtatcaacagtgccggggaagagggcagttccggcctggcctatgatttacaggtgctgcgcaccctggcgtcgccggactcaccgctgatgcggctgggaaaagcggtggtggagcagaccacgctggtgccgccgccggacccgcaggccagacagaaacaactggcgcagcgcgcatccggtaacgcggggaaagtggtacagacggcaaaactgttccaggatattcacccggaagaacggctggaaaaaacgctggtggatgatcgtttcgccgcgctgcgcgaggtcattgccgggcggacggacggcggacagagcggcggtgggacgatgcagatcgcttcgctgctgaccatgctcaacgagtattacacccaactgaccattgctgatagcgcgctggcggcggggacgttgccagcgcgcattactgccgcagacaagttgcaactggaggcggcgaaactgcccgcgccgctgaaaaacatcctgctggatctgacgaagcagggaacgcgcaaaatcaacgccgggaccggcgacgtgctgaacacccagatggaggcgatgatgggcgacgactgccgtgacgccatcgacgggcgctatccgttcgccgacagtccgcaggaggtcagcgccgaggactttaaccgcatcttcgccagcggcggcgtactggatgctttctggagcaaacaactggctccgctggcggacaccgccagcgacccgtggcgctacaaaccgaccgaaggcaacatgacattgcaggggccggatctgacgccgtttcagcaggcgaagcagatccgcagcgtattttttaacagcgagggcgggaaaaaattttcctggtcgatgcagattagcgtggtggatatggacccggccatcacggaactggtgattgatatcgacggccaggtgctgcgctacgcccatggtccggaccgtcccctgaaagtaacgtggccgggaccgcgcaacggctcgatggcggaaatcaccgccagcccgcgtattcgccaggacacctcaacgctactgaccggcgggccgtgggcgctgtttcatctgctggacgccggaatggtacaggaaacggcggtgcgggggcgtcaactggtggaatatgattttgacggtcgccgggtggtgctggaaatcaccgccgggcgggattttaacccggtcagccgggagctgttgcagaacttcagttgcccggcgagggcgctgtaatgcgccggccagcagtggtatcagccccggcgatgttcggcaggctgccggaccagcgcgactatgtgcgctggcgagtgggcgctgaagagggacgaatatggcaggactggctgaaccgccagacgtgggtgggcagcgggcggcatatcgtgttgccgggaggccagacgaccgatgaagagcgtgacggctggatgcacctgtcgccgcgtggcgaacatgatatgcccgcgccggaacaccatccgctgccgtggagctttgtgatgtcgccgggatttttgccgatgggtgggacgactgactggctgaccggagtgctgatggcgtcacgggatagcgtgggacgcccgtggccgctggtgatttaccagcgctgcggtcgggagtggctggacgagagtttgcaggagacgcagggctggctgtactggctggcgaggctggcggcgcagcatatcacgccggacacgatgcggcgcgggcggctgaccgagcaggtggaccagctatgggcgatgtggcagccggggccgtggtgggcgcagtggctgcgtgggttacgacgtacatcgcaacgcagccgggaactgaccgggctgccggatgaagcaccggtagtagaactgccgggcgtgcgttatctgccgtggccgggctggccgggtaagacgctggggcaggcaacaccggggcaaggctggttctggcagcagaacagtgaagggcggtatgtggatgcgctgcggttggtggatgaaaaaaatagaggtcagatgctgtgaaaaagtacgctgtagaggttctgtttatgtctgcctgtgcaggaatgttcctgcccgtatttgcctggggcggaacagatgtaaacattgataacccgctggcggagtgtgtggatatccatcccgttcatcgtcaggaaatggataaccttaccattctgaaaacaacggtcacactgaaaaaaagcaccggtgaatgtggctgtttctcaacattaatcaactataccagcttactggcgcaggatgttgagggttacggacgcggaagtgcatattcccttcaggaggggaatatctcactggcgaagatgcagggacgttatcctttcagctttgtattatcggtggataaccagtctgtacgggatcagaagctggcgctaatgatacgttgtacaccaccgctgtaatacacagaatagtcagggagaagatgatggcagtaagactgacttttgacgggcaaaagctgacatggcctggtatcgggatatttaaggcgaccacggggttaccggatttacagtggccagataaacagtgtgtgccggatgcggcgataccggaagggaattataaattgtttattcagtttcagggggaggcaccgataagaaatgctgcggattgtgatctgggaccatcatggggctggagtaccattccgcgaggccaggctgccggaacatgtgagatatactgggcgaactggggatataatcgtatccggctggaatcagcggatgagaagacccgaaaagcctgtgggggcaagcggggtggtttttatatccatgattccaccaaaggttacagtcatggttgtattgaagtggaaccggtgtttttccgtattctgaaacaggagacggaaaaagaaaatggtgaaaagacatttacggttaatgttaagtatgtttctggtcagcaaacgaatggtggaacaaaacaataataccgttaaaaccggatgaaattatcgtgtctggacgtgctgtggttgacaatgattacaatggtggccagataagtaatgagcaccaatgataaagtatatgactggcggtgtgctggttattaatcaaatttctataaaatgcaatgcgaatctggtaagcgtaataaaaataaaatcataatattgttatgttcatttccttatttatgtaattcagtatttatgttatgtgctaatttttgtgtttttattttcatggctcttgtcagcaatataccctgttcttctggtaaatatttaaatataacaggctggttgcattataaagtgcggggcactgtttcctgacggtgagtctatttattttaatccggtattaaaggagtcactaccatgagttttgtatccacaaataataaatccggtatgggagggctgacgacaaccacgccgccgataaccggagaaagtggcggtgtcaccgcagattcagtcgccggaagcgtggcagatgcggcggaatccgccgtggaacaggctgcgggatcgctatttggcgcattgccggagccatcaggactggtgaaagccgcggtagcagcggcgcaggctgccgccgccgcaggtatggcgcaggatgcggtatcggccatcgtctctgctgttgcaggcgggccgggggcgcataatgtgacggtcagcggcagcgccgtaccgccgggcgcattactgttcgccagcctggacggcggcgaaacattaagtgaactgttcagctatgtggtacagctaaaaacgcccgacaccctgaatctgggctatgtctccccggcggccaacctgccgctcaaaccgatggtgggcaaagatctgtgcgtcaacatcgaactggatggtggcggtaaacgacatatcagcgggctggtcacggcggcgcgggtggtgggccatgaagggcgttcggttacctatgagctgcgtatggagccgtgggtaaaactgctgacccataccagcgactacaaagcattccagaataaaaccgtggtggatattctggatgaggttctggcggaatatccctacccggtggaaaagcggctggtggaaagctacccggtacgcacctggcaggtgcagtacggtgaaactgattttgattttcttcagcgactgatgcaggagtggggcatctactggtggtttgagcacagcgaggacagccacacgctggtgctggcggatgccatcagcgcccacaaagcatgtccggactcgccgctggtcgagtggcaccaggaagggctgaagctggacaaggagtttatccacactatcacggcaaacgagagcctgcggactggacagtgggtgctggatgatttcgattttacgaagccacgttcattgctggcaaacaccgtggcaaacccgcgtgaaaccggtcatgccacctacgagcattatgagtggccgggagactacttcgacaagagtgaaggcgagatgctgacgcgcattcgtatggaagcgcagcgcagccccggcagtcgggtgctggggggagggaatatccgcacactcatgaccggttataccttcacgctggaaaactatcccaccgccgaagtcaatcaggaatatctgctgatgcagaccttgctgtttgtgcaggacaacgcgcagcacagcgggcaggaccagcactttaccttttccacccgttttgaactgcaccccacccgcgaggtgttccgcccgcagcggacggtgagcaaaccccacaccaaagggccgcagagcgccatcgtcaccggcccggcgggccaggaaatctggacggatcagtacgggcgggtaaaggtacagtttggttgggatcgctacggcaaaatggatgaaaacagcacctgctggatacgcgtcagctacccgtgggcgggcaaaggcttcgggatgatccagatcccgcgtatcggccaggaagtgctggtggatttcaaaaacggcgatccggatctgccgatcatcgtggggcgtacctacaaccaggacaccatgccgccgtggggactgccgggaatggcgtcgcagagcgggatcttcagccactcgctgtatggcgggccaacgaacggcaacatgctgcgttttgacgacaaaacgggcgcggaggaagtgaagttccacgcggaaaaagatctcaacaccacggtgaagaataatgaaacgcatacggttatggtggatcgcactaaaaccattattaaaaatgaaaccaacagtattggtgaggacagaaacaccacggtaacgaagaatgacggcctttccgtaaaactggcgcagacgatcaatatcggcaccacttatcgtttagatgttggcgatcaattcacgcttcgctgcggcaatgcggcgcttgttttacataaggacggctccattgagttttgtggcaagcaactgatgttacataccagcgatgtcatgcaactgattggtaaaggtattgatatgaacccggatggcggcacagccgtaaccgccgatgatattgccccccttctcacctctgagtgatctgaattaaacctggagttctcatggatcgaccataccgcatacaggaagggtgttttgtcctgcctgaaacatttacggatcgcagcgtcaatatttttatcctggagggcaatgaacgaacatcgcccagcctgaatatttcccgcgatacgctaaaacctgatgaagacctgcccgcctatattgaccgccagattgcactgatgaaaaaaaatctcggtcagcaccgggtattgtcgcgagcgcctgcacaggcaggaacgggcaatgatgcccttatgggggaacaaattgccgccacccataaatccgggaaaacggaagtgtaccagcgtcaggccgggtttattgcaacccctggcaaggtactggtcttcaccctgaccagtccccgtccttttgatgataaagcagacctactctggaacacctggctggcaggctttcagccggataaaaacgaataatcacacggaggtgtgaccatgtatgaagcagcccgtgtggatgatcctatctaccacaccagcgcgctcgccgggtttcttatcggcgctatcatcggcatcgccattatcgcgcttgccgcctttgccttctttagctgcggttttcttgccgggctgattctgggttttatggccgatcaaatagcctccggggtattgcaactgggcgaggccatcgggcgctccatccaccacacggcaggaaaaatcctcaccggttcggagaatgtcagcaccaacagtcgcccggcggcgcgcgcggtactgagtacggtgaaatgcgataaccatatcgcagaaaaacgcatcgcccaagggtcggaaaatatctacatcaacagccagcccgccgcccgtaaggatgaccacaccgaatgcgacgcggtgattgaagacggttcgccgaatgtgtttctcggcggcggcacacagacggtactggaaatcagttctgaaattccggactggctgcgcaaggtggtggatgtattgtttgtcgtggcgagtctgctcggcgggctggccggggcgtggcggcaggcggcaaagctggggacgaaatttggcactaaatgtgccgctaagtttatcggcggggagcttgtcgggatggccgtgggtgaggctatcagcgggctgttcagcaatccggtggatgtgaccaccgggcagaaaatcctgctgccggaaacggacttcaccctgcccggtcgcctgccggtcacctgctcgcgtttttacgccagccacctggaaactgtgggactgttgggacggggctggcggctgaactgggaaaccagcctgcgcgatgacgatgaacacatcacgctgaccggcgtacaggggcgggaactgcgttacccgaaaacgatgctgacgcccggccaccagatatttgacccggaagaacagttatacctcagccgcctgcatgacgggcgttacgtgctgcattacaccgatcgcagctattacgtatttggtgattttgacagtgacggcatggcatacctgctgtttatggagacgccgcaccgccagcgcattgtcttcgggcacgaaggaggcagactggtacggatagcctccagcagcgggcatcacctgttactgcaccgcacacagaccccggcaggggagcggctgtcgcgaattgaactggtgcagggcggcacccgtggcaatctggtggagtaccggtatgacgataacggtcaactgaccggcgtggtgaaccgggcgggaacgcaggtgcgtcagtttgcttaagaaaacgggctgatgacggcgcacagcaatgcgacggggttcacctgccgctaccgctggcaggaactcgacggcgcgccgcgcgtgacggagcacgacaccagtgacggcgaacattaccgctttgactatgattttgccgcaggcaccaccaccgtcaccggcaggcagggggagacatggcagtggtggtacgacagggaaacgtatatcaccgcgcaccggacgccgggcggtggaatgtaccgcttcacgtacaacgaagaccacttccctgtcaacattgagctgcccggcggtcgcacggtggcgtatgaatatgacatccagaaccgggtggtgaagacgacagatccggaaggccgggtgacgcagacgcagtggaacggcgagttcgacgaaatcacgcgcacggcgctggacgatgacgctgtctggaaaacgcagtacaacgcccacggccagccagtgcaggagacggacccggaagggcgggtgacgcagtacgcttacgatgaacaggggcagatgtgcagccggacggatgcggcgggcggcacgcagggcggcgtgcggcgggagacgcagcagcgggatgcgctgggccgtctgttacggacggagaatgaacacggccagcggacgttcagctacaaccggctggaccagataacggcagtgacgctcacgcccacggaggcggggcaacagcagcaccggatgcaggccgacacggtgcgttttgagtatgaccgcagcggctggctgacggcggagcacgcggggaacggtagcatatgttatcagcgcgacgcgctgggcaacccgacggacatcacgctgccggacgggcagcacctgacgcatctgtattacgggagcgggcatctgttacagacggcgctggacggcctgacggtgagcgagtatgagcgcgacagcctgcaccgtcagataatgcgcacgcaggggcagcttgcgacgtacagcggctatgacgacgacgggctgctgagctggcagcgcagtctggcgtccggcagtgcccctgttcttcctggccagcgcccggcgcggcagggctgcgtgacgtcgagggactattactggaacaaccacggcgaggtgggcacgattgacgacggcctgcgtggcagcgtggtgtacagctatgacagaagcggttacctgaccgggcgctcaggtcagatgtatgaccatgaccgttattattacgataaggcgggcaacctgctggataacgaagggcagggagcggtgatgagcaaccggctgccgggctgtggtcgtgaccgttacggctataacgagtggggcgagctgaccacgcggcgcgaccagcaactggagtggaacgcgcaggggcagctgacgcgggtcatcagcggcaacacggagacgcactacggctacgatgcgctggggaggcgaacccgcaaggcgacgtacgggcggcacacgggccatacggcgcggagccggacggactttgtgtgggaggggttcaggctgttgcaggagaacgtgcagcagcagggctggcggacctatctgtacgatgcggaacagccgtacacgccggtggcgagcgtgacggggcggggagaaagcaggcaggtgtggtattaccacacggatgtgacgggcacgccgcaggaggtgacggcggcggacggaacgctggtgtgggcggggtatatcagggggtttggagagaatgcggcggacatcagcaacagcggggcgtactttcaccagccgctgcggctgccggggcagtattttgacgacgagacagggctgcattacaatctgttcagatattatgcaccggagtgtggacggtttgtcagtcaggatccgatcgggctgaggggcgggttaaacctttatcagtatgcgccaaatcctctcaaatatatagacccacttggtttaaccgcgactgttgggcgatggatggggcctgcggaatatcagcaaatgcttgatactgggacagtagtacaaagttcaacagggacaactcatgttgcctaccctgctgatatagatgcttttggtaagcaagcaaaaaatggtgctatgtatgttgaatttgatgtgcctgaaaaatcattagtacctacaaatgaaggatgggcaaaaatagtagggccagattctatcgaagggcgattagctaaacgcaaaggtttgcctgttcctgaaatgccaacagcagaaaacataactgtaaggggcgagaaaattaatggggaagttgaagcaaaatgctaaataaatttaaattgtgggtgagcaaacatactgattatacggtaattcataatgaaaatgatttatcttacagtattattatagattttgaagatgaccggtatatatcaagatttactgtatgggatgacctaagctgtatgtcagaagtaatggatgtggatactggtttatataaattaaacaagagaaacgaattttctacatttgatgaacttctggatatatttgatgattttatgataagtattaaataatagttggccgggtaagaagttaactcttcccggctgttttattatctaacccccatcaatccggagacgcgctaccggtacgatgcgctgggcaggcgggtgagcaaggcgacgtacgggcggcacacgggccatacggcgcggagccggacggactttgtgtgggaggggttcaggctgttgcaggagaacgtgcagcagcagggctggcggacatatctgtacgatgcggaacagccgtacacgccggtggcgagcgtgacgggaaagggagaaagcaggcaggtgtggtattaccacacggacgtgacgggcacgccgcaggaggtgacggcggcggacggaacgctggtgtgggcggggtatatcagggggtttggagaaaatgcggcggacatcagcaacagcggggcgtactttcaccagccgctgcggctgccggggcagtattttgacgacgagacagggctgcattacaatctgttcagatattatgcaccggagtgtggacggttcgtcagtcaggatccgattgggctggcgggggggctgaatctttaccagtatgcgcctaatccgattagatggatcgatcctttaggacttgctatcctggagcatcaatctaattttgatgcggcaaggagaaccggatttgaaaatgcgggtatgacaaaccctgaggatgtcactttctcgaaagtcgatcccaaaactggtactgttgttgagtttaaaggtccaaatggggctaaagttgcttatgatgcacctcatgcagatatggatgtgacagcagggcatgataaaccacatgttggttggcaatccgcaggaaaaagaggttccggaggagctaatagaggtaatattacttatgatggcccacaacatccgcatcgctctgactctaagggagatgataaatgttaaattcaaatatgtctgaacttagaatcgaactggagaatgcgattaaaaatctcggtattcatgattatcgtgtcgataaacccgaacaaatcgtttctgagataaaagagatatatgttaatggtaatcctagaacctggtggttatcattaaaacatagacaatatgtcttttcttataccgataattctggatataaaaacatatcacaaatagtaagtaaacaactcaatgaaagcaatgtaatcaacaaacatatatttttgattgctgatgaagataatgagcaaatatatgtatataacgttcctcttaactccctgcctgaaattatagaaaattgcagatattttgaatattatgttgcagatcatgaactatcttggcttatatgtgaaaatgatcatggtgatttgattgtatgctcaaccattaagtaaagcgcgagtgctctttagcgatatagttgcccatatttaggcgttactagccgaagatggcgcgattgtctggcaggggaaacagcaattctgaggtcaggaagatagcataacccattaaccgggatagatccgctagacctgaatccagttgatgcgacaggttatagggtttatggttatttgctcctggagcaaataaaccttattacattggtattactaatgatatggtttgacgaagggccgagcattaaagcactggcaggttatcaaaagaaaatggaaggatgctgccatttgatgaaaatgtaatctaatggaaagtcagaggttacgagaaatattatatagagaaatataaaaccagaaccggaaccataggtgaaaaaattccctcaacaaatagagagaataaatataattcatttgatcatgggcgaacagatcccagcgcacaagcatttaaagactcttaaaatagtaagggagttggttccggtggaggaaaatgcggatgagtgattaagaattttggggctgtgataagaagtcgagaacaatgctgcgttttgtgaagcccggagacatattttgttttaaattagatgaagatagatattgttttgggcgaattataacactaatgactgtcggacatctttctgaattatttgatataattaaaaaaccccctggaataacagagttagaaattagtaatgcaaggcgaattattgaaccaattatagtggatacatattctttatttgataagaaattagaaaatggaagtgactggagaattattggtcatcaggttaattacaatccaaaaaatttagatggtatctattttgcacttggaataggtgattcctgtaaaaagaaagactgttacggaaatgattttctcatttcagaaagtgagtggaaaacacttcctaaattatctcctaaagggggttttgatatcaaaaaacggcttgaaattgcctgaaaatgaaaataaaaagccgggaaagatcttttgtcttcccggattttattatttaatccccgttcaccacattatttacccccgccttaatatgcttcatcgactttttcacctgataaagctccttccgtagatccctcacttcgtccgtctctgcaatcaggatcaaacacccctcggagatcttcacggtgacgccgtgcccggtctcaaatcccgcttcttcctgccagtcacccttaaggtgctggctggggatttgtgagtaacaggcggtcatgcaggtttcgctgttgatatggcggacgctgacgccggaggcattcatatttgctgactaaataaattcttatttatccgccggatgctggctgattgtggagctcagggtgagtgagtatgggcgcgacatcctggcaccgcgcctccctctccccggccagccccggccggtgatgagcagccggctgccggggccgtattttgacgatgaaacgggcctgcattaaaatctgttcagatattatgtaccggagtgtggctggttcgtcagtcaggatccaatagggctgaaagggggatggaaccgatatcattctccgctgaatcctattacagatagtgatcctcttggccttattacttgtggtgctgatagaggtgattctggcaagttattaagatgaaaaatggttgaaaataattgcgttagtgaatgctcatttatgcctttacctacaaaaagtaacggatttgcttgctggaattgtgttaacgaatgcaaataaaatcaatgctgttgatgtttttactacaggaataagtatggttaacgataaggatacagctatattaattagtgatttaatgttgagattcggtaaggagcttgatgaatctgttgctgttgttcagtcccgttgtgatgaggatgaatttaatgtatatcgagaaacggttggttttatcatgggtgaaatgcttattaaaataatgaatccattatatgaaaaacatccagaaataaaaccaaaaggattgaaacaaaacatctggaaccggatgaataatgtgtaaaagccggaggggttatcttttcccggctttttattatcaattactcattaactcctgttccgttcttttgcgtttaatcaccggaatatctccggtattgttcagcgccccggaaatgtttttaaccactgttctgcactccgtttattaatgcgggttacgcccatcccttcaatacagccaaagagtccgtgggtatgctgcggcgtgatcacgatgcaatccctcattacccgcaccttgacgggcatcccgttaataaaccccgcctgcggcatccattcaccgtacaaacgaactgaaagtctctcaacgcgtgagtatgtaagtatcccgcataatcgagccattcacatttagagatcatccgacataatcaatctgccaacgcaggagatcgctatgcgtaaagcccgtattactgcgcaccagatcatcgctgtgattagatcagtcgaatccggacggactgttaaagatgtctaccgggaggccggtatttctgaagccaccagggacaactggaggtctggatacggcggcagggatacgcgtggaatcacaaaaggctccaccgtatttactgtctgctcaagctgaattttcgccgtaagggtaaacaacggctgccggtacgcaatccctcgccactggtcacgccggaagcgctgaaccagagctggtctgtgggcgtcgttttcgcacgttcaatgttgttgatgactgtaatcgtgaagcgttgtcgattgaaatcgatctgaatctgccagctctgcgagtggtccgtgtactcgacaggattacagcaaccgcggttatctggccatgctgcgtatggataagggaccggaatttatctcgctggcactggctgaatgggcaaagaaacatgcagtaaagctggcgtttatccagccgggtaagccgaagaaaaacgttttcatcacgcgctttaaccggacataccgtacagaaatactcaattcttatctgttcagaacgctgaatgaggtgtgggaaattacggataaagggttatcagaatataactgcgaacgtccacatgaatcgcggaacaatatgataccgaaggaataccgccaataacgttatctggccggaatcttaaaaatgcatggaactaaaacgggtctatttacaggggcacctgcgatgaatttcgctgcactgaaaagcgataccggatgagagctgcttcaaattaatgtgccatgttcacggggaggttgtgcgacgtttgcataatccagcaagaactgaaaggaaggggagagctttttcatgcctgtataatcagtctggcctgtgtcagtcagctcttagtgttgagactctcgttggagcgttataattgcttttctgtttcggaaaacaagattttccattaaagatcttccctgcgaggaaaagttaactaataatcttaccgtcgagttaggagatgtatgtttaaatataaacaatgttgcaacgatgcctgataattatcctctcttcgaagataagtttcccacacccagtgtagtaggtgtcatggtaatgttatcacttgaatgtaaatggaaggtataattgctttttgactggcattctattccaccctgacaacacgatgttaacatcaacactgtttatattggcaataacgcaatttttttcagattaagaggtgctctgatatatagatttttatgacattacttatttgaattggtaacaaataccaataagtacaagctgttattaccagccacggattttttacatacggtaagatttggtatggcgttatgtattctggatgtgctggattattttaatttggtttaaaaaaggtggttattcaaatgaaaagcataaaaaaattgattatcgcaagtgcgttgagcatgatggctgctagttgttatgctggctcatttttgccgaactcagagcaacaaaaatcagtggatattgtgttttcctctccccaagatttaaccgtatcgcttattccagtgtcgggcttaaaggctgggaaaaatgctcctagcgcgaaaattgcgaagcttgtagttaattctactactcttaaagaattcggggtcagggggatttctaacaacgtggtagacagtactggcactgcatggcgtgtagctggtaaaaatactggtaaagagatcggtgtgggcttatcaagtgacagtcttagaagatctgatagcacggaaaaatggaatggggtgaactggatgacctttaatagcaatgacacacttgatattgtcctgacaggaccggcgcagaatgtcacagctgacacgtacccaataactttagacgtagtgggatatcaaccttaatagtaaacaactattagtgtattgtgccttgtttaaggcgcaatacacatcaaatcatctatttttcttttacaatttttgatatgaaaatagttaattttgctgtaatggcggtagctttgttcgccactaattctatggtttcagtatatgccgtcaaccagcaattaaattcagccactaaattattcagcgtgaagctgggggctacacgagtgatttatcacgctggtacggctggagcgacgctctcggtgagcaacccgcagaattaccctattttggttcagtcttcagtcaaagcagcagacaaaagttcgcctgctccctttttggtgatgccgcctctatttcgtttagaagcaaaccagcagagtcaactgcgtattgtccgtactggtggtgacatgccaacggatcgtgagactttacagtgggtctgtataaaggcggtaccacccgaaaatgaaccgtcggatacacaggctaagggcgcgacccttgacctcaatttgtccatcaacgcctgtgataagctgattttccgcccggatgccgtgaaggggacgccggaagatgttgcaggaaatttaagatgggtggagacgggcaacaaacttaaggtggagaaccccaccccgttttacatgaatttagcctctgtcacagtagggggaaagcccattacagggcttgagtatgtccccccctttgctgacaaaacactaaatatgccaggtagtgcccatggtgatatcgagtggagagttattacagactttggtggtgaaagtcatccgttccactacgttcttaaataaatccaggggcttagcggcagaaaatgaagttcaaacaacctgccttgctactgttcatcgcgggagtggttcattgcgcaaatgcgcacacttacacattcgatgcatcaatgttgggcgatgcagcgaaaggggttgatatgtcgctctttaaccagggggtacaacagccagggacttatcgcgtggacgtgatggtgaatggtaaacgtgtcgacacccgtgatgtggtgttcaaattggaaaaggatgggcaaggaacgcctgttctggctccttgtttgacggtcagtcagctttcacgctacggcgtaaaaacggaagattaccctcagttgtggaaagcagcaaagcccccagatgagtgtgcggatctgaccgccattccacaggctaaagcggtactggatatcaataatcagcaactgcaactgagtattccgcagttggcgttgcgtccggaatttaaggggatcgctccagaagatctttgggatgatggtattccggcgtttctgatgaactacagtgcgaggacaacgcagacggattacaaaatggatatggtggggcgtgacaactcttcctgggtacaactgcaaccgggaatcaatataggtgcgtggcgtgtccgcaatgcgaccagctggcagcggagtagtcaactgtcggggaagtggcaggcagcatatacctatgctgagcgtggactgtactcactaaaaagtcgtctgactctggggcaaaagacttcgcagggggagatatttgatagtgtgccatttaccggtgtgatgttggcatcggatgacaacatggtgccctacagtgagcggcagtttgctccggtagtgcgtgggattgcccgcacgcaggctcgggtggaggtcaaacagaatggttacaccatttacaacaccactgtggcgcccggaccgtttgcactgcgggatctgtcggtaacagacagtagtggtgatctgcatgtcaccgtgtgggaggccgatggcagtacacaaatgtttgtggtgccgtatcagaccccggcgatagcactgcaccagggatatttgaagtacagcctgttggcgggccgataccgatcgtcagactctgcaacggataaggcgcagatcgcgcaggctacgttgatgtatggtctgccgtggaatctcactgcatacggcggtatacagagtgcaacgcactatcaagctgcattgcttggtttggggggatctctcgggcggtgggggagtttatctgtcgatggaagcgacacacacagtcagcgtcagggggaggcggtacagcaaggagcctcctggcgactgcgttacagcaaccagctgactgcgacggggacaaatttttttctgacgagatggcagtatgcctcgcagggctataacaccctatccgatgtgctcgacagttatcgacataatggcaaccgtctatggtcgtggcgggaaaatttgcagccgagctcgcgtactaccctgatgttgagtcagtcatgggggaggcatttgggcaatctgagtttaaccggttcccgtaccgactggcgtaatcgccccggtcatgatgacagctacggactgagttggggaacctctatcggagggggctcgctgtcattgaactggaatcaaaacagaacgctgtggcgcaatggcgcgcaccgtaaagagaacataaccagcctgtggttcagtatgccattaagccgctggacggggaataatgtaagtgctagttggcagatgacttcaccatcacacggtggtcagacgcaacaagtgggggtcaacggagaggcattcagtcagcaactggattgggaggtgcgtcagagttaccgtgccgatgccccgccaggtggtggtaataacagcgcattgcacttggcatggaatggggattacggcctgttaggtggtgactatagctacagccgggcgatgcgccagatgggagtcaatatcgcgggaggtatagttatccaccatcatggtgtgacgctggggcaacctttgcaaggctcagtggcgctggttgaagcgccaggggcctcgggggtgccagttggcggctggcctggcgttaagacggattttcgtggcgacaccacagtgggcaacctgaacgtctatcaggagaatacagtcagcctcgatccgtcgcgactaccggatgacgcagaggtcacacaaaccgatgtgcgcgtggtgccaaccgaaggggcggtggtggaagcgaagtttcacactcgcatcggggccagggcactgatgacgctgaaacgggaagatggtagcgccattcctttcggggcgcaggttacagtcaatgggcaggatggcagtgctgctctggtggatactgatagccaggtttatctcactggtttggcggataagggcgaactgacggtgaaatggggagcacagcaatgtcgggttaactaccgcctacctgcccacaagggaatcgcgggcttgtatcaaatgagcggtctctgcagatagccgattctgaaggagagaataatgtggatgaaaatacagcgagtgaaaacggttatctatagcgtaagcttactggtcgctgccagtagcttggtgccgatagcgaacgccgcagaaaaacttcagacaacgctacgtgtaggtacttactttcgggctgggcacgtgccagatgggatggtgcttgcgcaaggctgggtgacttatcacggcagtcacagcgggtttcgggtatggagcgatgagcaaaaggcgggtaacacgcctaccgtattgctgctgagcgggcaacaggatcctcgccatcacattcaggttcgcctggagggcgaggggtggcaaccagatacggtgagtggtcgtggcgccattttaagaaccgctgcagataacgccagtttcagtgtggtcgttgatggcaatcaggaagtgcctgcggacacctggacgctggattttaaggcctgtgcattggcgcaggaggatacgtagccgtctgttccactcatacttcctgtatcagtgaataaggcgaatactgtatatcaggttcgaggatgtattgaaaatttactcaaggcaaatatggttagcaatcttcattgcagaaaaatcaattgctgattgattttaaaatctgaaattcatcttttttgtagggagaggaatattatgtttcgtaaaataatttaacggacactgatgcctttattatttctgttttgtggatttgtttgattcactcttttgtgagcggggctttataagcccctggtataaggtttgtttatctgtcaggtattcatatgtgatatttaagattttatgtttagggggctttttcttgtcccctcaggcgtaaaaataatttattttttacataaaggaataaagcatatgtcttatgcacgacatttaccggtattaatgtatcaccatgtcagtgataaacccggacagataaccttatctccccgtacgttccgggcgcagatgaaatggctggccgaatctggctggaaaaccgttactgctgcagaggtggaagctttttatcatggtgcaagattgcctcgtaaaagcgtcatgctgacctttgatggcggctggctggataactggttgcaggtttttccggtgctgcaggagtttaatctgcatgcgcatctctttcttgtgaccagtttgatcagtgacggaccggtccgtattcctgcaggcgaaccggtgtactctcatgatgagtgtcaaatgctggttaaacaaggccgggctgatgaggtcatgctgcgctggtcagaggtccgggagatgcacctcagtggccttgttgagtttcactcgcacacgcacacccaccgacgctgggaccagaagcctgtgtcccgtaatccgtcggatttgcttcgtgtcgatattcttcttagtcgtaagcggatgagggagatgctgggttattgcagtcagcatctgtgctggcctgagggctggtattgttctgactatattcatgtggctgaagagttggggttcacatacctgtataccacagaaaggcgtatgaacaatccagtcatcggttcacagcgtattggtcgtatcaacgcaaaggagcgaaagaatgtgggctggctgaaacgtcgtctgttttatcacaccacgcccggattttcttcgctgctggcccggcataagggggcacgtcggatagctgactgagccagagaccaggatgaaagtgctgcataccgaatcctcccccatcatcggcgggcaggggttgtaggctatatcccaaatgatggtgctgattttgagcagaaataagataacaccggaggccgtgatagacccggttgcgcagaatctggaggcagcaggtcactggcgcagggcttctacccgctggcttttggttatgggagattttgaatgtacagaggcccagcgggagtggttgttgttgcgccggaattattgccttgcgcagatatcttcccctggcgccagtaaagctggatatcagcgacgtgacgaaatgagaggagcctgcacataggtttgtgttttgagtaagtgtcttatttaaaccgtctgttctgtttcctccgctttcacaaataatgtcgagccgggtgggggactcaagtaagaataatctggcgatgttttgcttgtttccacgggatactttgttaggtgaacgatacaattaatgcgctccagactgcgtcacagaaaaggagaatgcctttgcagaacgggcgcatgacaatgaaccactttattattggtatctggttcggcgacaaccttgacgatcacgtctgagatagggtatttacactgagtggtaaacaggttcaattagtaaccggagatggatgcaaaatcatgatcgattcagatgctattttgcagccaatagattttttattaagatgatatcaaggacattgaggcacacaatgacgtatcagtaagtcgttgatagctcatttgatataagaatttcttttatcaacggaagataatgatggaactgatcaataatcgtggtatgcgagactggatgatatttattaaagtggcggaagtagggaatctttcccgggctgcgcgggaattagatattagcatttctgctgtcagtaaatcgcttagtcgccttgagaattctattgaggttactttacttcggcgcgattcacatcacttagaactgactggagctggtcagacagcctatgcaagcatgaaaaggataacatcttcctttcagtccttgctggatgaattgcgaaatccggataaaattatcagagggagtataaaattttcggctccggctattgtctgtgagtttcttgccaataagtggatatgggaatttacagctagctatccggatacaaaaatctacctggattcacgagagcgtagcgatttttttagtaaatccctggagtttgatgagctggtttttaaaagtggcataatcgaaagtgaggatctcgtgtatcgaaagataagccctttaaagttggttctttgtgcgagtccgaaatatatcagaaaatatggcaggatctcacaccctggcgatttggaaaatcacattattgtgggtcttcacaaccatggtctttccggacctcttactcttttccgtcaggatgaatcatacactattagtggcgctgttaatgttcatttatcttccaataatcttttgagtgttcttaatttggttttagaaggaaagggtatcaacctcatgactccggcctggcttgccaccaaatacttaaaaaataatgaacttgaaattatacttcctgaatggagggttccagatctccccatttatcttgtatggcgtcatcgtcagtattattctcctttatttcaacgctttctgtcttttattgaagataaatggaataatcgcccacaaattgattttctgaatgatgattaacccgtttggaatggttttgatacgttcctgacttaaacccacatgatgactgaattgaggcatcgagatatgcgactggtcagccagtcgtcttttgacgatgcccaatacaaaacatgatgccgactgacggaaatgataatacccggaaacaggacggggctgtttttgggcagccggaagttaagcccataccagaaacgttgcagtgtactgaaaaatggcgccaggttgcacctgttcaaagattttctgaaggcgcaggagtattcattactgatatcctccattgcgccttcgggaacccacaggaccagctattttaccgatagtgtttaaaaggcgtaagtaatgccgagcatgaagtcattggaggcagcctttgtgtctgcatcataagcggtatgttcatcaccagcatagtgattttttgaaatgcttactttgccagcattaatgtatttataactggcgtcaatcataatattatctgttacagcatattttgcaccgatacctgcgccccaggcaaagttattttttgaagcagacagagtttcattaataccaaaaccaacaggaatggtgttattacttagcttcacatgagcgaggccaacgcctgcgctgatatagggagtaaatgccgtactattgtgaaaatcataatagccattaaccatgtaagtggtcattcggacctgattttttacatttatgtgtactggatcaccaaatgcaataatatcctgcccgcctttagcatccgtctcacctctgaaagtggtatccagttctaaacgtactggaagctggaatggatcataaaagtcataaccgatagcaaccccgccgccaaaaacgcctttggtacggtcaggtaacgttgcatgaccattaactatctcatcctggctgaaggttgagttgattccatagacattgactacggatgtccccgctttcccggtgatatagatcccttcttttgctgatgcagtagcggaccaggctaccacaaggggaatgatgcagactgcgaaaaagtttttcatttcagaacctgccttaatattgggctaaaagacaagtttcacggtatagggtgtgatataacgattacataaacgaagcccaaaaaacggtctattgtaacgctgggttttctgtaagcgggtaaaaaatgagatgaagattttaaataacaatacgataatcgtcggtatggaaatccatctcctcgccaaattgccccacgtacggtttcacttctacgttatgtaacgggtagtgtgagatggagcgatgctgtaagaaaaagatgaagatgaatttgtacccgacctggataaagcccgttatcccggaataacgggcaaaaatatttactcaagtgcctgggcgagatcttgttgtacctgttgacgctgttctggtgttaagactttgcttaaatcaaaataatatttaacccgataatagcgagcctgttgttctatgttactgaaggctgcaagctgctgttttacggcggcgtcatcccatttaccggatttaatcacctctatcagcgcaccgtctttaattcccttcatagaaatctgactgacgtcggtttccagttgttggtgaagttttttgatccgggtaatctgatcgtttgtcagcttcagatgctggacaataggatcctgggcgggcaggggaggattggggacagcggtggcgaaagcgccaaaagaaacgcccgccagagtcgctgccagtaaagttgtgcgtacaaagtttttcatgaagatatcctgataagggagtgattaaccgtttttattacccacgaatggcgagcaattatcttagagcctatcccagtagggctattttacttgccattttggacctgggcagtgctcgccaaaacgcgttagcgttttgaacgccgctagcggcggcccgaagggcgagcgtagcgagtcaaacctcacgtactacgtgtacgctccggtttttgcgcgctgtccgtgtccaaactggctgcgccaataacgcctggtgggataggctcttagtcagaatacgttgcctgccacattacgccacgcgaatttgttttacggagagttacggagtgaaacaatcccgccgcggtgagcggcaggttgcttacaaggtgaatggatcggcatcgcgccaggctggaaatttttcgcgatagtcctgcaaggcgacgagagaaagatcggcatcgatacgtgtcgcctggtgtggttcggcggtggcgataatgtcgccctggggattaatgatccggctatcgccgcgataatgtagcccgttaccatcggtgccaacccggttgcagcctgcgacataagcctgattttcaatagcgcgcgccgtcagtaatgtttgccagtgtagcgagcgcggcgcaggccagttcgctacatacagcgccagatcgtaatcattgcggttgcgcgaccatatcggaaagcgcagatcgtaacagatcagcggcagaatgcgccaaccgcgccactgcacgatgatgcgtttatcgcctgcggcataatgttgatgttcatccgccatacgaaacagatggcgcttatcatagagatgaaccttgccttccggttcaaccagtaagaagcgatttacggcgccgcgctcagtttgtagcgccgcgctgccggcaatcagagcgtcagtttgtcgggctttggcctgcatccacgtaatcacgctatcttgcgaaagtgagttattagcggcctccatcgcgaagccggtggtaaacatttcaggcagaacaatcacatcccggccagatacgagctctagctgtctgtcaaaatgacgcaggtttgccgggccgtccatccagactaaaggttgttgcaacagagtaattttcaaaccagacacgatcggagctcctcattgaacagcgtctttacactgtagcatgagcaataataaaaaagcggcaagaaaaagccccgcgaaagcggggcaggaaagacacgagactgattatgcggcttcgactttacgcactttctccggcagctttaccggtttggtcgccagcgcttcaggttcaaaatcatcaacgttgatactgcgcaggcggctctcttccgctttcgccaggatggcggcttcatctttatctataagccctttcgccagcgcattgcgcgccagttcatccagacgagtaaacggcagatttttacccagttctttgcagatgcgctggtggatagggtcggcagcgatgacatcacgcagcgcttcttccagtaaaccgaccggattatgttcggcgggcgtcagatactgaccgcgcccaatgcgtgaacgtgtggcgttcggcacctgtaggatcttcgccacggcgtgatccagcttatcagacggcgccagataatgacggccagtcgggaagatcatcgcggtgagcaatccggccacgacgcggttcgggaagttctgcagcagatcgtccatcgcttgttcagcacgatacagcgcatcctgtacgccccagtgcaccagcggcaggtcggcttcgtggcgaccttcgtcgtcgtaacgcttcagtacggctgaggccagataaagctgactcaacacatcgcccagacgcgcggagatacgctcgcggcgtttcaggctgccgcccagtaccgccattgacacgtcagacagcagcgccaggtttgcgctcagtcggttcagatgctggtaataacgcttcgtggcgtcgccggttggcgtatggctcgttaatccgcgggtcaggccaagccagaaactgcggacggtattgctgccgacatggccgatatgtttaaacaacagcttatcaaaggcattcacatcattattctgcgctgcggccatctcttccagtacataaggatggcagcgaatggcgccctgaccaaagatcatcatgctacgggtcaggatattcgcgccttccacggtgatcgcgataggcgcgccctggtaagcacgcgccaggaagttgctctcgcccagcataatgcctttacccccagtgatatccatcgcgtcgataatggactgctggccacggtgggtgcagtggtacttcacgatagccgacagtaccgccggtttttcacccagcataatgccataggtgattaacgatgcggcggcatccatcacataagcgttacctgcaatacgcgccagcggttcctcaataccttccatcttgccgatagatattttgaactgacgacgaatgtgagcataggcgccggttgccagcgcgacggatttcaccccgccagtggagttggacggcagggtaataccgcgtcctaccgacaaacattccaccagcatacgccagccttgtccggccattttggggccgccgataatataatcaataggcacgaaaatatcgttaccgcgggttggaccattctggaacggaacgttaagcgggaagtgacgacgaccaatttccacacccggcgttgaggtggggatcagggcacaggtaatacccagctcttcttctccgcctaacaatctatccggatcggaaagcttaaacgccaggcccaacacggtagctatcggtgccagcgtaatgtaacgcttgttccaggtcaggcgcatacccagcacctgctggccctgccattcgcccatgcaaaccacgccggtatccggaatggcgcctgcatcagaacctgcttccgggctggtcagcgcaaagcaggggatctcctggccgcgcgccagtcgcggcagatagtgattcttctgctcttccgtaccatagtgctgcaacaactcgccagggccgagtgagtttggaacgccgacggtgatagccagaatcccggagacgccggacagtttttgcagtacacgggactgcgcataagcggagaactccagtccgccgtactcttttttaatgatcatcgcaaaaaaacgatgctctttcagataagcccacagttccggcggcagatccgccagttcatgggtaatctggaaatcgttcgccatccggcacgcttcttctaccggaccgtcgagaaacgcttgctcttcggcagtgagttgcggttgcggatagttgtgcagttttttccagtcaggcttgccctggaacagatcgccttcccaccaggttgtaccggcatcaatcgcttctttctcagtgcgcgacatcggcggcatgaccttacggaagccgcggaacaccggtgcggaaatcattgattttcgcatcggtgtgaggttaaacggcacgaggataatggccagaggaaccaacagccagatggaccacaggccagcgacgccaagtgcggcggtccaggcgagcagaatcaggctgctgagaaataaactcacgcggtgatagaacaatgcgccgagcagaacaaccgtagcgataatactcaaaatcatcataacgaaaagctcccttgcttgtaggaggtctgaccacttgtgatgattaggttgtagtggatgtaaaattttttagcaatgtgtttacaaaataattacaacaaagctcacattgttgccgtttttgggggcacgaaaaatcaaaagcgtgaggcgttaattcggcttatgcttctcgcctgtactgctatccggtacactgcatactgtcatttacattcatgctgaaggatatcctcatgtaccaggatcttattcgtaacgaactgaacgaagcggcggaaacgctggctaattttttaaaagatgacgccaatattcacgccattcagcgcgcggcggtcctgttggctgacagttttaaagcgggtggtaaggtactttcctgcggtaacggcggctcccattgcgatgcgatgcactttgctgaagagctgacaggtcgttatcgtgaaaatcgtccgggctacccggcaattgcgatttctgatgttagccatatatcctgcgtcagtaatgattttggctatgactatattttctctcgttacgttgaggcggtagggcgcgaaggcgatgtcctgttagggatctcgacgtcgggtaactctggtaacgtgattaaagcgattgccgcggcccgtgaaaaaggcatgaaagtgattacgttgaccggcaaagacggcggcaaaatggcgggaacggcggatattgaaattcgcgtaccgcacttcggttatgccgatcgtattcaggaaattcatatcaaagtaattcatattttgattcagttgatcgaaaaagagatggttaaataactatacccgtcatacttcaagctgcaggtgcgttggttgcgctcagaaaccccagtcacagagttatctatgttcctggggatttcctcccttaccgccttcctgcaactcgaattatttagggtatagcatattgttttcttggatattttgagatttgattggctgtaaaaattacgccttcccgcttaaggcgtttgtggaggtgatatatgtgcgaactgcttgggatgagcgccaatgtgccgacggatatctgctttagcttcaccggactggtgcagcgtggcggcggaaccgggccgcataaagacggctggggaattaccttttacgaaggaaagggctgtcgcacgtttaaagatccgcaaccgagctaccattcgccgattgcgaaactggtacagaattacccgatcaagtcctgctcggttatcgcccatatccgtcaggctaatcgcggtgaagtggcgctggaaaatacacacccttttacccgggaattatggggacgcaactggacttatgctcataacggtcagctcaacggttataagtcgctggaaaccggtaattttcgtccggtgggggaaaccgacagcgaaaaagcgttttgctggctattgcataaattaacgcagcgttatccccgcacgccgggcaacatgacggcggtatttaaatatattgcgacactggcgacggtattacgtgaaaaaggcgtttttaacatgctgctgtcagatgggcgatatgtgatggcgttttgctcaacccatttgcactggatcactcgccgggcgccgtttggcgtagccacgctggtggatcaggatatggaaattgatttcagttcacagaccacgccaaatgacgtggttaccgtgattgctacccagccgctaacggggaatgaaacctggcaaaagattatgccaggcgaatgggcgttattttgcctcggagagcgtataatttgaggccagctgtggctgaacgacttcgtgactcaacggtttgctcacgacgtaacgtccatcaacgatagaaacagtcggcggcttatgcgtctgttcaaaataatcgtagccgggttttagctgcgcccagaaatctttgtaatatgaatatttatgacgctgcatattggcgtcggtcatccggaacggataaatactcacctgcacgctcggctgaccaaagaccagcgcggcggtgacaaactggaaaatctcatcaatgccgctgtcggtcatggcatagcagccgacggaaacacaggcgccgtgaatcatcagatatttaccatcatagccatgcgcgcgatcgtaggcattgggaaaaccaatgttgatggccttataaaaacggctgtctggtttgagttgattacgctgaacgctgtaaaacccttccggacttttaaaatcgccctgacggcgtttcgggcctaacccgccggaatagttgcaaattttgtagctatcaagcaactggtattgctcacccattttgacgtagagatcaagggtgcgctcttctttaaaaatctgaatatagaccggtgagcccattaactgctgcttatactctttactgaccggcgtgacggggctgctgctgctcagcaaaccggcaaatgagacgcacggcatcagaagcatcgcaagaaaaaatgcgattttacgcatactgcttgttccttgataaaacggttacacacgccagaacggcaaaagagtccccaaatcggagtaatctggatttggagcgctcacattagcaccacggcagtttttcgcaagtccccgtgtgtacgtttacaattttcccgccgctttcgtcgtcataccttcgaatatgtcgcatttttaacgcgaatgtctctttgcgcgcaataaaacatactgtacacttaaacagtattgtgggggcgagcgatgcgcaaaatcatacatgttgatatggactgtttttttgccgcggtagagatgcgtgataatccggcgttacgcgatatccccattgccattggcgggagtcgtgagcgaagaggcgttatcagtaccgccaactatcctgcgcgccagtttggcgtacgtagcgcgatgccgaccgccatggcgctaaagctgtgcccccatctcaccttactgcctggccgctttgacgcctataaagaggcttcgcggcatgtacgtgacatcttttcccgctacacttcactgattgaaccgctctcgctggatgaagcctggctggatgtgactgacagcccgcactgttatggttcggcaactctgatcgccagggagattcgtcagactattttcaatgaactgcaactcaccgcctccgccggcgttgcgccagtgaaatttctggcgaagatcgcctccgatctcaataaaccgaacggacaatatgttattacgccagccgatgtacccgactttcttaaaacgttgccgttagccaaaattccaggcgtggggaaagtttccgccgccaaactggaaaatatggggttaagaacctgcggggatattcaacagtgcgatctggcgatgcttctcaaacgctttggtaaatttggccgggtattatgggagcgtagtcagggtattgacgagcgtgatgttaacagcgaaaggctgcgtaaatcggtaggtgttgagcgtactctggcggaggatattcatgaatggtcggactgcgaggccattattgaacatttatatccggaactggagcgtcgtctggctatagtaaagcccgatttactgattgcccgacagggcgttaaattaaaatttaatgattttcagcaaaccactcaggaacatgtctggccgcaattaaataaagaagacttaattaccaccgcccgtaaaacctgggacgagcgtcgcggcgagcgcggcgtacggctggtggggctacacgtaacgctgctcgaccctcaactggaacgacagttggtgttagggttataagtcaggccattaatattttatcactattacgattgcgccatctaaatttcagtattactatacccgcgttttctcattctcaataactgcaaaggaggttcatcatgacactttattctctgaacgcactttgcagacctttccaggattaattttcttttattgccctggattagtctgccatttcctgattttttaattcatatatggaatggtatatgggcaattatattcgtcctttatcagatgtggtattttctatcgcatcagataacctgtggatcgaagattccgcgatccaacaattatatacgacggctaagttaaccggtatgaaacgcgttatcgggatgccagatctgcatccggggcgtggctatcctattggcgcagcctttttctcgcgtggacgcttttatccggcgctggtcggcaacgatatcggctgcggcatggcgttatggcaaacggatattttagggcgtaaatataacgccgataaactggagaagcggctggcgtcgctgactgacgtggcggacgcgcagtggctggaggagaatgtccccgccgcaatgcagcatcattcgtggcgctctgcgctgggttccattggcggcggcaatcattttgccgagctgcagcaggtcgatcgcatcgtcgatgctgattcgttcgctttgtcggggttgcaaaaagcgcagttattactgctggtacacagtggttcacgcggtctggggcaagctatcctgcgtcgtcatgtggaggcgttttcgcataacggtttgccggaagatagcgacgatgcgcgccgctaccttgcagaacatgacgatgcgctggcatttgcccgcagtaatcgcgcgctgattgcccgccggatactgcaacagctcagggctgagggcgaaccgcggctggatgtggcgcataacttcgttgaaccctgtactgtcgcgggtgaggcggggtggctgcaccgtaaaggcgctacgccagatgggcagggactggtgattatccccggctcgcgcggcgattatagctggctggtgaaacccgtcgtcagcgaggagagcctcttctccctggcgcatggcgcaaatggatgcgtaccgagtgtaaagaccggttatcggcaaaatttaccccgcgacagctctgccgtaccgggatgggtagccgggtgatttgccgcgatcgccagctcatttatgaagaagcgccgcaggcgtataaatccatcgatagcgttgtggattgtctggcagacgccggactgattacgccagttgcctgcctgcgtccggtgctgacgctgaaaacctcaggggagaaaagcgcatgatcttactgcaactttcttctgcgcagggaccggacgagtgttgtctggcggtaaaaaaagcgctggattgtctgacgaaagaagctgccagagaaaaggtatcgctgacgcgacttgaaacagagccgggacgattaccagacacgctgcgttccgcgctggtctcgctggacggcgaaaaagctatggctttcagtgaacgttggtgcggcacgttactgtggatttgtaccagcccgtatcgtccgcaccatgggcgaaaaaactggtacgtcggcattgggcgcttttccgccgacgagcacatacagtctgatgagattcgtttcgagactttgcgctcttccggcccgggtgggcagcacgttaataaaaccgactcggcagtgcgggccacgcacctggcgagcgggattagcgtgaaggttcagtcggagcgcagtcaacatgcgaataagcgtctggcccggctgctgattgcctggcggctggaacagcaacggcaaaatgagtgtgcggcattgaagtctgaaaggcgtctgttccatcatcagattgagcgcggcaatccgctgcggatatttaaaggaatggcgtttacgccacaataattcggtgttactggcgctgttatagggctgtctggctattcgcgtgtagccgcagcgctatttcagcgcatccaggagagcttatctggcaatggatacccgatattccatattgatagcccgtccagaaatgggacgggcattttagcgctttcttacttcgcaggaatcgctttcagcaattcggtcagcagagtccagtagtggccgacgctttcgatatgtacctgctcatccggagagtgaggtccggtaatggtaggcccaatagaaaccatgtccatatccggatagggtttcttaaacagaccgcattccaggccggcgtggataatctggatgttcggtgtcttgttgaacagacgctgataggtttcccgcaccaggtgcatcaccggcgagttcgcatcgggctgccagccaggatagctgccttttgcttcggttttcgcgccagccagcttgcccagcgaatccagcatactcaccacataatctttaccgctgtcgataagagagcgaatcaggcagtgaatttcgacattcgcatcggacattgtgaccacgccaacgttcagcgatgtttccactacgcctttcgccacgtctgaattgcggatcacgccgttcggcgttgcgttcagcaggcgcacaaaggtatcgcgtgacggcgcggtcaatgcggctttatcactggcaacctcattgagttgcagcgtcaggtttttctctttttccgccagttcgtttttcagaatatcctggtaagcgttcactaatgttttcagcgcgcctacgttgtctgcggcaacggcgagggtagcgaacgcttcgcgcggaatcgcgttacgcagcgtgccgccgttgaaatcgatcagacgcagatccagttcttctgcgtgcccggccagaaaacgcgccagcaatttgttggcattgccaagaccgaggtgaatttcaccaccggagtggccgcctttcaggcctttcagggttagcttaaagcacgcaaatcctgcgggtacagcttcacgggtcaacggcagattagaggtaaaatcaataccgcctgcgcagcccatatagatctcaccttcttcttcagagtcggtgttgatcaggatgtcggcctgcaaccagccggactggaggccgaacgcgccatccatgcccgcttcttcggtcatggtcagcagcacttccagcgggccatggacgacattatcatcagccagtaccgctaacgcagaagccattccaataccattgtcggcgccgagcgtagtaccgcgcgctttaacccattcgccatcaatataaggctggataggatctgtagtgaagtcgtgaacggtgtcgctatttttttgcggcaccatatccagatgcgcctgtaaaacgaccggcttgcgattttccatacctgcagtggcgggcttacggatcagaatattaccgacctggtcgcgatccacgtaaaggcctttctctttggcccaactcacaatatgttccgcgagttgctcttcgtgataggacgggtgaggaatagaacagattttggcaaaaatatcccacaaaggttgtggtgataactgagacagttcagacacgataagtctccttggcggtggtctgaaaaacgttcttacaggccacagggttagcggaattgataactcttacgagatgcgactgagaataccactttctccgcctgcgggtagtataaagcatacaaaaagaggcgtggattccgctaaacactggtttttagcgcgtcaggtctctataatctcgcgcaactatttccccctcgaacactttttaagccgtagataaacaggctgggacacttcacatgagcgaaaaatacgtcgtcacctgggacatgttgcagattcacgcacgcaaactggcgagccgcctcatgccttcagaacaatggaaaggcattattgccgtaagtcgtggcggccttgtaccgggcgcactactggcgcgtgaattgggcattcgtcatgtcgataccgtatgcatctccagctacgatcacgataaccagcgcgaactgaaagtgctgaaacgtgcagaaggcgacggcgaaggctttatcgtcatcgacgatctggtcgataccggcggcaccgccgtcgcgattcgcgaaatgtaccctaaagcgcatttcgtcacgattttcgctaaaccggcgggccgtccgctggttgatgattatgttattgatattcctcagaacacctggattgagcagccctgggatatgggtgtggtatttgtaccgccgatttcaggtcgttaatcagcagcttttcagagcgcccggcaatgccgggcgctgttttattggttacaataagcctctatgagtatccaaggaggctgcacgaatgacacaggctaacctcagcgaaaccctgttcaaaccccgctttaaacatactgaaacgtctacccttgtccgtcggttcaatcgtgggtcgcagccgcccatgcaatccgcgctggacggtaagaacgtcccgcactggtatcgcatgataaaccgcctgatgtggatttggcgcggcgttgacccacgagaaatccttgatgtgcaggcgcgcattgtgatgagcgacgcagagcgaacggatgatgatttatacgatacggtcatcggttaccgcggcggcaactggatttatgagtgggcaaagcaggcgatggactggcagcagaaagcctgtcaggaacaggacgccatgcgcagcggacgctactggcttcatgcctcaacgctctataacattgccgcctacccgcatttgaagggcgatgagctggcggagcaggcgcaggcgttggcgaatcgcgcctatgaagaggccgcgcagcggttgccaggctcgttacgtgaaatggaatttgccgttcctggcggttcgcctgtcaccgcgtttttacatatgccgaaaggggatggcccgtttccgacggtgctcatgtgcggcggcctggacgccatgcaaaccgactattacaccctgtatgaacgctatttcgcgccgcgcggtatcgcgatgttaacgcttgatatgccttcggttggattttcatcaaagtggaaattaacccaggattccagcttgctccatcagcatgtgttaaaagcgcttcctaatgtcccctgggtggatcatacccgtgttgcggcgtttggtttccgttttggcgccaacgttgcggtgcgtctggcctatctggaagcgccgcgtttgaaagcggtggcttgcctggggccggtggtccatgcgctacttagcgatccgcaacgacagagcacggtgccggagatgtatctggatgtgctggccagccgtctgggtatgcatgatgcttcggatgaggcgctgcgtgtggagctcaatcgctattcgttgaaagtacaggggctactgggcagacgttgtcctacgccaatgctttccggcttctggaaaaacgatcccttcagcccggaagaagagtctcgcttaattacaacatcatcttcagacggtaagctgatagagatcccttttaacccggtgtaccgcaattttgaccgcgcgctgcaagaaattaccgactggattaatcatagattgtgttaatagattgataaattctattgatttggtaaaacagttgcttcattaaaggagatcgcaatgacgttaccgagtggacacccgaaaagtagattgatcaagaaatttaccgcgcttggcccctatatccgggaagggcagtgcgaagacaatcgttttttttcgattgcctggcagtttgcgtcaacgtgaagcccgcgccagagaagcgtgaattttggggctggtggatggagctggaagcacaagagaaacgcttcacttatcgttatcagtttggtttgtttgataaagagggcaactggaccgtagtgccgattaacgaaaccgaagtggtggagcgactggaatacacgctacgcgagtttcatgaaaaactacgcgacctgctgatttctatggagctggcgctggagccgtctgacgatttcaacgacgagccggtaaaactgtcggcataaccctgctgccatgcctgatggcgcagcgccatcaggcacaatgcgacttatcagaactggtaggtcaaccctattgccacaatatcatcgtcattaatgcctaacgtgttatcgctatcaagctgattgattttgtaatctacaaacgcggacatatttttgttgaagtaataggttgcgccaacgtcaatgtaattcaccaaatcctcactgccgacgccctcaatatctttgccttttgacagcacatagcctaatgacggacgcagaccaaaatcaaactgatactggataaccgcttcgaagttttgggttttattggcaaatccgccggaaactggcgtcatgttgcgggtttctgaatagaaggtcgcaatataaatatcattagcgtcatacttaacacccgtagcccaggcttcggctttatcgcccgtaccgcggcgctgcagattttgctccctggtgcgatcggagagagtataagcgccgctgacggcaaaatcgctgccgccgaaatcatagctcacggatgtgccgaagccgtcgccgttttgctttttcacatcgcgatcttcgtttttcccctgatactgtaaggtaagatccagtccatcaacgatgccgaagaaatcggtattgcggtaagtcgccagcccgctggcgcgtttagtcataaaattatcggtctgggcggaagagtcgccgccgaattcgggaaacatatccgtccaggcctcaacatcgtacagcgcgcccaggttacgtccatagtcaaaagaaccgatatcttttaatttcaggccagcaaaggccaggcgggttttttgctgggacgaatcactttcggctttattactggcaaactcagcttcccagcgcccgtagccggtcaattgatcgttaatttgcgtttcgcctttaaaaccaaaacgaacgtagctttgatcgccatctttgctgtcataatcgctcatatagtgcatggctttaacttttccatacacatcaagcttattaccgtttttattgtaaacctcggcggcgtgaacagatgctgatgcgatgatactcaccactattgccagagtgcttttattcatttccattcctgttttaattacgcgctatgatttgtcgggaaacccggtaaaaaacaggaaggtttttaacgttcggtaatgaaagatttatgacaaagtgagaatttttttaaaaaaatatgtttaattgttgcggtaataaaatggtcaaattccgccgctacgcttgctgatcctgcgcaacaaaatttcacgctacgcgtacaggttgttggcaaccggagccagtcctgctaaaacgttcatttggtctttatttcttattttgaacggcagagaatcatgagtgacagccagacgctggtcgtaaaactcggcaccagcgtgctaacaggcggatcgcgccgcctgaaccgtgcccatatcgtagaacttgtccgccagtgcgcgcagttacacgccgcgggacatcgtattgttattgttacctctggcgcgattgccgccggacgtgaacatctcggctacccggaactgccggcaacaattgcctctaaacagcttctggcggcggtagggcaaagccgcttgattcaactgtgggagcagttgttttcaatttacggtatccatatcgggcagatgctgttgacgcgtgcggatatggaagacagagagcgctttctgaacgcccgcgatacgctacgtgcattactggataaccatattgtgccggttatcaatgaaaatgatgccgttgcgacagcggaaattaaagtgggcgacaacgataacctctccgcgctggcggcgatcctggcaggcgcggataaactgctgctgctgaccgatcagcaaggattatttaccgccgatccgcgtagcaatccgcaggcggagcttatcaaagatgtgtatggcgttgacgatgcgctgcgctctatcgcgggagacagcgtttccgggctgggaaccggtggtatgagcactaagcttcaggcggcagacgtggcctgtcgcgcgggtattgatacgattattgcctcaggcagtaaaccgggcgtgatcggcgatgtgatggaggggatttccgtcggcacccgttttcatgcgcaagcctcgccgctggaaaaccgcaaacgttggatcttcggcgcgccgccggcaggtgaaattacggttgatgaaggcgcgaccgcggcaatgctggaacgtggcagttcacttctgccaaaaggcatcaaaagcgtgacgggcaatttctcgcggggggaggtcatcagaatttgtaacctgcaagggcgtgatattgctcatggcgtcagccgttataacagtgatgctctgcggcggatagccggtcaccactctcaacaaatcgatgcgattctgggctatgaatatggcccggtcgctgttcatcgtgatgacatgattactcgataaggaacaggcatatgctggaacaaatgggcattgctgctaaagcggcgtcgtataagctggcgctgctctccagcggcgaaaaaaatcgcgtgctggaaaaaatagccgatgaactggaagcgcaaatggaaagtatcctcagcgcgaacgtacaagatgttgagcaggcgcgagccaatggcctgagcgaagcgatgctggaccgcctggcgctgacccctgcgcgtctgaaagcgattgctgacgatgtgcgccaggtctgtaatctcgccgacccggtcgggcaggtgatcgacggcggtctgctggacagcgggctacgtctggagcgccgccgcgtgccgttgggcgtggttggcgttatctatgaggcgcgtccgaatgttaccgttgatgtggcttctttgtgtctgaaaaccggtaatgcggtgattctacgcggtgggaaggagacgtatcgcacgaatgccgcaaccgttcgtgtcattcagaaggcgctgaaagcttgcggtttaccggaggcggcggttcaggcgattgataatccggaccgttcgctggtcaatgaaatgctgcgtatggataagtacatcgatatgctgatcccgcgcggcggcgcaggcttgcataaactgtgccgcgagcaatccaccattccggtgattaccggcgggattggcgtgtgccatatttttgttgatagcagcgcagacatcgccccggcgctgaagattattgttaacgccaaaacccagcgcccgagcacctgtaacacggtggaaaccttgctggtgcatcaggacatcgcagaacgctttttgcctgcgctgagcaagcagatggcggagagcggcgtaacgttgcatggggatgaaaccgtcatgcaggtactgcatggccctgccaaactggtgccgctgaaaccggaagagctggataacgagtttctgtctctggatctgaacgttgtggtggtcgaaaatatggatggcgctatcgcccacattcgcgaacatggtactcagcactccgatgcgattttaacgtgcgatatgcataatgctgcgcgtttcgtgaacgaagtggattccgctgcggtttatgtcaacgcctctacccgttttaccgacggcgggcagtttgggcttggcgcagaagtggcggtcagcacgcagaaattacatgcccgcggtccgatggggcttgaagcgcttaccacctataagtggatcggctttggcgatggtacgattcgtgcgtaattaatgacgagcggtgcaaaaatagccggttgagtagcaaggctattgacgcaccgcccggttagttttaaccttctaccccgtgattcacccgcgtgaacacacccttctcagggccgatatagctcagttggtagagcagcgcattcgtaatgcgaaggtcgtaggttcgactcctattatcggcaccatctaaatcaatcacttatgtacaacctcatttctcaaaaacaccattttttgctctcgggtacactctcgggtacacaactagcaaaacataagcagtatcccacctaacccaaagatgatttcttgtttaccatgcgccatgagttggcctaccatttgataggctgaatacgtattggaaagattctacattccatcatgttaatgattccgtctcagagctatgtactctgatcctacccgcgtaatatgggcacaaccctaagcgaggttctggttttcaaattgttccggactgagaccgccacaggcactgtgacgacgctaccgattgtaatcacactcactataattaaacactgctgtccgcattatttcccggctgacaaagtcctctccgtggatacattccaccttcagcgtatggaagaagctttccgcacaggcattgtcgtaacaacaacctctggcgctcatacttccccgcagattatggcgtttcagtaagctctgataatccgttgaacagtactgaccgcctctgtctgtatgcacgatgacattttccggacatttacgccgccacagcgccatctgtaacgcatcgcaggcaagctgtgctgtcatccgcgaagacatcgaccagccaatgactgaccgcgaccacagatcgataaccacggccagataaagccagccttcaccagtgcgaagatacgtgatgtcacccacccacttctgattcgggccgctggcgtaaaagtcctgcttcagcagattctctgagactggcagaccatgtttgcggtaactgaccggacggaaccggcgcgaggctttcgcccgcagcccctgccgacgcaggctggccgccacggttttcacgttgaactggtaaccctgagcacgaagctcatccgtcaggcgtggcgcaccatagcgttgttttgcgtcactgaatgcttcccggaagacgttatcacagacaaggtggaaccgctgacgccggtttatctgatgacgacgctgatgccagacgtaccgcttacagatgcaggctatcgccagcgagctaagcgcccggttaaataccccagttgaagtcggtggtgtggaagccaacatggctgtggctggcgcgttaacgacgcctggatgcgacgctccgctggcgatcctcgatttaggcgcaggatccaccgatgccgccattatcaataacgatggcgtagtgaaggcggtacaccttgccggggcggggaatatggtcagcctgttgattcaaacggagcttggcttaagcgatccgtttttggcagaggaaatacccgctggccaaagtggagagcctgttcagcattcgccacgagaacggcgcggtggagttttttcgtgaaccgcttagcccgtcagtatttgccaaagtggtgtatctgaaagagggcgagctgatcccggtcgataaccagacctcgctggagaagattcgtctggtgcgccgtcaggccaaagagaaagtctttgtgaccaactgtctgcgcgcgttacgtcaggtctcgcccggcggctcgattcgcgatatcacttttgtggtgctggtaggtggctcatcgctggattttgaaattccgcagatgatcaccgatgcgctggcgcagtacggcgttgtcgccgggcagggtaatatctgtggtactgaaggcccgcgcaatgcggtagcgaccgggctggttttagccggagaagccaaaaaatagtgcagaaaacagccgcgcaagcgtttagctgcggggtaagtcaaagaaaggcgatgttctctttgatatcccggcggagttgggtacatagtatcaaggtgtctctcacgtggttaattttaaggataagagcatgccaacagcaattgagaaagccttggattttattggtggtatgaacacatcggcgtcagtaccccattcaatggatgaaagtaccgctaagggaattttaaagtatttgcatgatttaggcgtgccagtaagcccggaagttgtggtggcacgaggtgagcaggagggatggaatcctgagttcacgaaaaaagtggccggatgggcagaaaaagtcgcctccggtaaccgcatccttatcaaaaacccagagtatttttcgacctatatgcaggagcagctcaaagaactcgtgtgagctgactatcgaataaaacgctaacggacgtttccatctaaggatggcggcgtccagaagggttgccagtgacagttttggactgccgattcatttcttttcgtcaaattaatgtctatatatttattgaataaatatatagttcataacttactacgttgccattaccgcgtcattcttagatgatctacatttcataaaacacttgattccatttcgtctctattaagaaaaataaaatgtgaacgctgtcaattctgtaaacgtaaaagataaatattgtatacacggatgtttgttggcaaacaggcagatggcaatcaggatcttttacggaacattgtgtatgaaaaataatattgaagagacaataggtaagtacttgcctattttaatgatattacctctggcgggtttggcagagttagcttctttatattcaatccaggctttattaccaaagttaagtgaggtttataatatcccattgaatcaggtagggatgattttatctgctgaggtggggtttctggcattagccatgttatttagcggcacgttatctgaccgttttgggcgaaagccaatcattttttattcgttgctggcaggaggtattttaactctattgtgcgcaactgcatcatcatggccgatgctggtggtataccgcgctttgctcggcattgcagtaagtggtattacggcggccgttacagtctatatcagtgaagaagtctctcctgctttggcagggattgttactggatattttatttttggcaattcgctagggagtatgtctggtcgtgtgtttgcaactttgatgatggagcatgtatctatagatacgattttctttatcttcggtggtgttctgattgctatggcactcgcggtgaagttgtttctcccgacatcccgacagtttgttcctacaccttcactacagcttggtgcagtgttgaaaggcgggttggaacattttaagaatatccgcgtatcattatgttttgtcattggatttattcttttcggctcttttacatccatctttaattttctggcgttttacctgcatcgaccgccttatgagctgagctacacctggataggtttgattccagttagcttctcattaactttttttcttgcgccatatgctgcccgtgtcgcgttgaatattgggtcgatgaatgcgctcagtatgctgatcatctgtatgatggtcggtgcatttcttacgctaatcgccccttctctgtgggttttcatttcaggtatcgttttactgtcagtcgcatttttctctgctcattccaccgtattagcctgggtcagttcacggagtccaaacgcaaaaggacaggcgacatcgttttatctgctttgctactactctggcggtgcagtaatggggtatttaaacgggtatcttttctcctggcagggatggaatgctattgcggcatcatgtctgatgatgctggggataggattatttatctgccggtttattttcgcaaaatatgagaaacaaccgcaaatcaaaaaacagtcagttcaggagagtttctgattatagacacgaagtgtgtttttatactttccataatggaatcatcattttttcattaatgtgtcactatagctaaaagcttaaattgtgaatatttggctacccggatattcgttgctccaggaatatatatgtctgctaaaacgctgtatgaaaaattagttgagtcacataccattcgtgaacttgataacgaaggacatgttttactttatattgatcgttcaatactgaatgaatataccagcccgcaggcatttagcgggttaagagaacgcggccgcaccgttcggcaccccgacacgtttttattgaatattgaccatgttaatcctacgcggtcgcaacgggatgacttaatgaccgatccgggaggacagctacaggttgattactttcgggaaaatgccgctgactttggcatcacattatttgatgtgctggatccgcgtcaggggattgaacacgtggttgctcatgaacaagggctagtgatgcctggcatggtgatcgccgccggggatagtcacacgacaacctacggtgcatttggcgcgctgggctttggtatcgggacgtcggaaattgaacatctgctggccacgcagacgctggtttaccgcaagctcaaaaccatgcgcgtaagtgttcagggagagctacctttcgcctgttccgcaaaagatattgttcttgaattgcttgaacgtattggcgctgatggcgcgacgggatatgccattgaatttgtgggtgaggccatcagcgcgttgagcgttgaaggacgaatgacgctctgcaacatggcggtagaagcgggggcgcgtggtgccattattgcgccggataaaaaggtttttgactatatctacggtaaaccgcaaatgcctgtaggtgaactctggcagcaggcattgctggaatggtcacagttgagcagcgatgctgatgcggtatttgataagacggtggcgatcaactgccatgatcttgagcctaaagtcacctggggaatcagtccggatcaaacaggttccatcaccggacgtgttcctttcccggaacaggaaaccaatccgcttaagcgcctggcgcttgagaaggcccttcattacatgggattaacggctggcatgttgctgaaagatattcgtatctctcacgcttttattggttcatgcacaaatggtcgcattgaggatttgcgtgccgttgcgaaggtgcttgaagggcgcaaaatcgccagccatgttcgcgggatcattgtgcctggttcaacaatggtaagacgccaggcggaagaagaaggactggcgaaaatctttattgctgccggttttgaatagcggcagtcgggttgctcaatgtgccttgcgatgaatgaagatgtattgtcgcccggcgatcgctgtgcatcaggtacgaaccgtaacttccctggacgacagggcgctggagcaagaacgcatttgatgagcccggcgatggttgcggcggcggcggtagcggggcatctggtcgatgttcggtcattacttcaggccggggaataagatggatacgtttaagcaaatcagcgggcgaattgcgccgatgctggaaccgaatatcgacactgatgtgattatgccaaaacagttcctgaaagggatcgatcgccaggggctggataaaggggtgtttttcgatcgtcgctttatggctggcggccaaccaaatcctgattttattctgaacatgccgggctggcagagcgcgacattcctgctggttggccccaattttggctgtggatcgagtcgtgaacacgccgtatggggattaaaacaactgggagtacgggggctgataggtagcacatttgcaggcattttcgatgataactgccaacgcaacgggatcctcacggtctcattagatgaacctgctttggcgcgcctggcgcagcttgccgcgagtgctgataccaattctatcactgtttcactcgatcgctgcgaaattacgacggcagaggaaacgatctcctttgtgatcagtgaactcaaacgggcgatgctggccgcaggcgaagatgcgatagcctggacattgcaatacttgccggagattgaaaattttgaggttgcgcattattcacggcggccgtggctaaaacgccctgcatccccgcgcggttaaggaagaagactgcaatgaaactggttcaatatcttgtgaacggtggcaaacgctacggcattatgcaggaaaccggaataattgatctctcgcagcggcttggcgacaaatatcccactttgaaatctctcctgtgcgctaatgcgctgacggatgcggcgttatggtgtgatgagccggcggattattactaccaggaagtcacttttctgccggtgattgacgatccgcagaagatcatctgtgtcggaatgaattatgccgataagcgtattgagtttaatgaaaccaacccggccccaaccctttttgtccgctttgcggattctcagaccgggcataatggcctgctgctgaagcctgaaaataccaatgagttcgactacgaaggtgaattagccgtagtgattgggcggcgatgctcccgggtcagcgctgaggatgctttagattatgtcgccggatacagctgctatatggatggttcagtgagggactggcagcatagctggtttacggctggaaaaaactggccttcgacaggatcattcggtccgtgtctggtgaccacagacgacattcccgatccccagatgctacgtttactgacacgactaaacgggcgggaggtgcagaacgaatctacggcaaatatgatccatcctatcgcttcactcattgcttatataagcacatttactctgctttcccctggcgacacgatcctcacagggtcgcctggtggagtgggcaaaaaacgcgttccaccgctgtttttacacgatggtgatgttattgaagttgagattgaacatattggaaccctgcgcaatgtcgtccgggatagccgttatttaacatcctctgttagctggcatgacgggagaaagtgatgagtacactgattgaatgcggcgcctctccgtttattccggggtttgcgctcaaggatgttcgtctggaaaatggtctgacggtaagagtggctatcggaggcagcggttcacctttggtactgctacatgggcatccgcagaatcatacaacatggcggaaagtcgcaccgacattggcgcaaaatcatacagtcattttgccggatttgcgtggctatggcgacagcgataaaccaacgagcgatccggcgcaccgtacctattcaaagcgcaccatggcgcaggatatcgtcatgttaatggatgcgctcggcttttcccgttttgcctttgtagggcatgatcgtggcggacgcgtaggacacaggctcgcgctggattatccggatcgtgtgacctgttgtacttttatcgacattgctccaaccgcgacgatgtacgccttgaccgataaatcctttgctacgcgttacttttggtggtttttcctgattcaacctttcccgttacccgaaacgatgattgcgcacgatccggcattttttctgcgtaagcatatttctggccagctaaaaatagagggcgcgacctcgcaggaagcattcaatgaatacctgcgctgttaccagaaccctgagatgatccacgcgatctgtgaggactaccgggctgctgcgacgattgatttggacgatgatgccgcagatacgtcggcgcgtatccggtgtccgttacagttgctgtggggagggctgggaacggtagggcaactatataatgtggttggtacctggaaagaaaaggcgctaaacgttcagggggaagcattgccttgcggacactccccgcaggaagagtgtcctgagtactttatccagaaacttcagtcctttttacattcagtgttataactcggtcatcctttgcaacttcgcactgatgctatgaaaacgacacctgtaggaaaaaaacatcgccagccccttgagggctggccttctgttgaagatcttttcgtttttgtcaccgttgctcgcaacggtggatttgcccgggcagcgctggagctggggttatctccctcctatatcagcaaacgtatcgctatccttgaaaaatgtctcaacgcccggcttttttttcgaaataacagagtgatgcgtctcacaccggaaggcgaaaatgcgctgggtggggctatgcaggtcgtcagtgaaatggatggctttgtcagtcgtttggataatcaacgtggtgtgttggctggtaatatcaccatcaactgctcatttggttttgggcataaatatgtcgcagaggcgctgtcgtcatttatgatcgcctatcctgatattacggtaaaactcacgctaacggatcgtgaagtggatctggtggaagaggggatcgatattgaaattcgcgttggggatgatatcaacgaattgtatatcgcacggcagttagccactaatcgacggatcctgtgtgcttcccctgaatacctcgaacgccacggcaagccagagtctgttagtgcgcttgtgcagcacgattgcctaatgattcaggaaaaaaactcggcatttggcaattggatattaacggacggtaagcagcagacacattgccgactaaacggttttcattcttccaacagcggcagtgtggtgcttatttgggccctgaaaggccatggcattacattgcggtcggaatgggatgttgcgcagtatattgaacgaggtgagctggttcgcgtgttgcctcagtggtatcaggaagcgaatatctgggctgtatatacccggcgttcatcaagttctgatcgtatcaaaatctgcatcgatttcctcacggagcatcttgcacaatgcttgccaggcggtaaagcaccgggcgtactgtgatcagtcggcgccaactgtcgtggcgccagatgctctgacttacgtttactgttaggtgttctttttgccagcacccagtagcttttagggcgttgcgttggtggcgcggttttgtttccgctatcgtggcgaagttatcttttatcccaccacgaggcccaacctccacatagatacctccattattaccggatttctcacctggttttaacgtcatattttatctcctgatttttgggtgacgattatcggaggttgagaattctattggtatcggctggatggcattgtaagtatcacacactcactccataacaatcagattgattgagcgactactttagctcaatagatatgtgttcatcttaagcgtattatcgcaggttggtaattaaaattctttaaaaaacaataccatccatcaattcaatatgctgatttttcgaggttttctcaaatttagttatgcttatgtaatgctacctaactgactaaaagtaatgctcttttcacacaaaagccttaacagaggaaacgcaatattacgtgacttaatgcctctgctcattctcattagttataccaatgtaatgttttctcacagcaaaagagaagtagctacctgtgcagcattataggcggaaaatccattgggggtattaccaaagatgaaatagaaaattaatattattaattaaatgaatatgaaacaggtattgttcctgttatcgttacaaccttttctgtcataacaatcttctcattttctttctcgcatacttgctgagcatggtataaatgtctatgaggacgtcagctcggaaagcattcgttctgcatggtatgcctttcgctattctcaggggcgtgaaatgaaagttttctttgatggagtctatataactatatgaaattgataataatcctccttctcgcgctattcccgttatgttcatctgccagcaatcattatgcccttgtttttgaaaataacacgatactgcttgttttaaatcttaaatgttctccctgtgatttaaactgcgcaaatattcaataccagattttcaataaagagacggagtctgttatttcaggggttgctaagcctgtgacaacgggcatcgaaaataattttcgtggttatatgatgcgtaataataatacgttctacacattaattgaatcagataatgaaaacgtatgggatatgtctgttgaggagaagggaactcaacagaacaaagatgccgtgcaaaaagtaaaatatcagcttaatgctatttttgacaatggtacatgctgagtctggcttgcctcagggatacgatcgtatccctgaatatttcccatcaaaactcaggagtaaaatcattctcactaatatatttttccagtatggcggtatattgtcgccagttcccggagtcattgattactgcataatttatcgatgctcccggcgttggcgagcgtgttagcggcacatcacgtgctgttttcggcgcaaccatgatatcgccgatactttttttgtcatccgtcgttagtgttaaactcatataccacgaggtggggttaactatccgtatagtattctctttagcaataaagcgtaattttttctcctccgcttccgtgggcgcttttagcccagtcgggcgaattaaaatttttagcctcaaacgaagcggtaacaccagttttcgcgggtggtttttaatgtcctgggtgactggcggtatctgataaatgtttagccagaagagactctcccggtccgttgccagctgctggcgggaactcaggagcaggcgaagcgttctcagttctcctggctgcattttaaataccggcggcagcgccaccagcggcgttttgctgttatccggagaggcgtcaatgtttccggcgtcggtccatacctgtaacagcatcggcgttgtattatcgttggataatgtcaacgattgagcgacctcatctgaagcaaaaataattcgggttctgtcaatattaacggcagcttgtgccgggccataccatcccgtcaacccaagtagcgttaatatgactttactgaaaactaaccactgcctgtaattgcgcattcacgcttcctgccgttactgtttgtccgccgatcgcctcaagcgaggcagtaaaatcaccgctgtaggtttctactgaaccggatgatacccgtgtggttaaatctttatagccataccagcctcgggcgttgccagtgcctgtcttgatccgatcgggtaacaggttaattggcgtaccggcatcgttatagatgcggatacccactccggaagctacgccaggttcgccataatgggtgtccagtagccacgacagaccgcctgcggatgtggttagccccaagcgacgcgccgccgccacggcggtgggttgattaacgacaaaccccattgcgacattagcggcgctggtggacgggagggcactggacacggcaccggactcacattccaggctgacgtggaaaggcgcctggctattgcctccggcggctaatatgccgacggcgacagggggaattttcacgatcgcaggataatctgtgattttacataacgcgccgcgaacataggtgacgctattatatgtactccatgccccgggccaatagctgggccagccataataatcgctggcatgatccagtcccgctttgatccgctcggtaatcaagcctgggcctttaaacgcgatataaccccgaggctgcgtccaggtatctcggtccattggattctggtaggcaaaatattttcttgagtcaattttaaacatctcatatagcacgttgctaaacgcgctggcaggaatataaatatatttgtcatcctgaaaccaactgtctgcggtaagttggcgttctttccagaaacggctgtaatattcgccggtactgaggtttgtcatacggacagcaacattacgctccacatcataataggcgccttctacttcgggagtaaaaaatgcccccgcaaaagcgctatcgccatttgtcgaatacatctcatagagcttcccggcatcggcagtatcgcagcggtaaagtacctgtttactggaatagggcgtgccggtggcggccgtcaggaagttaccgatcccactggccaatagcgtgccggagggttgaaatgtttcactattactgacgctaatcaccgttggcaaaccgatattaccggtatttgtgtcagttgcgccgatccagttttgcgccgtgtagcccgcttttatcgccgcgtcagagagcgcgctcttatcggtgactttgatacatgacgaccatgttccggcgctgacaaacaggctggtgataaacaatagcgttcggaaactaaaaagcattgtgctattccttctcgcagattttgttcagatagagaaacggttctttggtgtgaagatcgagttggtaggcaacccggcaacgctggtttgcccctgttccccagcgcaccagtagagaacccgacggatgggcgatacgggcataaatctgcccactctggccgaccatgccgatgtttgtgccttcaccgttgaaaacatcagcgcccattggcggtatgccgccatccggcatcttcacggagatcagcactgctttgccgctgatagtggcgaaattgacacgcgcgatggcgccagcatacggcacaatctgctgacttcctcccgtcagttcggcatcgctgcgcatcttacgggtatcgagcgtaacgttattgacgcggtaaggagataacgaaggcagaatggcgtaaccaaagcgatcaaccacagcgccctggccattttgtacgatcgcgccctgcgcgccatcggcatgaataagcgcaaaggtatcgctggtataggggccagccgtcagaccgccagggtgaagaaccagggtgccggacgcgcccagcccttcctgacgatagttatcaccctggtcatagttggcgcgaagtgcgccaaaccgggtgttttgttgtagattaccgccaaacgtcgttggcgcgctgctatcactatcactattgctattgcgataacgctcgtagccgccataaaccgaccatgacaggtcgctgttttcaccgctactgccggtcatggatacggttgaggaacgactttgactggactggttataattcatggcgacagacgttctgttttcgccccaatccagcggtatagagacattaaacgacattgtggtttcggtatatttttgtcggctactcacgtccagtggttcgttaacgccgtgataaaagcgatcgtaatcccaggtggtgcgctgtcgtgcgatattcaccccgtagcttatattccgccactggttgctatatcccatttgtagctgtgttatacgcgattggttattgtagtagtctgcggtgctggcgctgaggttaagcgtgccaagccgtcctaacggctggcttaccgtcgcggacaggcgattgcgctgatgcagcgtgtcggagtagtaatcaatccccgtttttgcttcccggcgtacgccgagcacgtcctgaagatcgcgaaagccgttggttgaataacgataagccgccagtaccaggttagtgccggtggtaaacgttttgctgtaactgagttccgcgcgccagccttgttggcgatcgttatgctctgcgcgcgcattcgaccaggtggcgttaaggccgaacgcgcccataccggtggcccagacgccgcccgccagccatgcctggtaacgctgcgcaattcgtgaaccgaggttgagggtaatggtgttattaacgccgtgctggaacgttccctcaaagaaacgattttcaatatcgtagtactgacgaaccctgccgaaggccagcgaatagtgccagttaccggggcgaaccgaatccggcacggaagaataaggcacggtgaaacgtgaggttttaccgctggcctcgataacctctacctccagatcgccttgataacgggtgttgtacagatcgtcaatataaaatgggcccggcggaacgttggtttcataaatcactttccccagttgttttactaccacgtgcgcgctactggccgctacgccccgaacttccggcgcataaccgcgtttgccctgcgggcgcatccgctcgtcggtgacaagtttagccccgttaaaagacagactgccgaataagctggagtccgtatagctatcgcccagcgacagaatactgttaacagacgcgacaggtctttgcacccaggttcgaacgctattatagcgccaggcgcttccgctctggttgctattggcatagcgcagattactttgatgacggacctgccaaagtccgaggttaacgcccatgtttaaaccgctccataagtattggtagcgataatggctgtcggtattttcggtgtgggtccagtttgtgttatggcgtaaaaacagcgccagcgcgccgctatcccactctgaaggagagatataaccgcgcggtttgtgcgtaagttcggtcattggaatcgtcagcaacaggcgaagcgtggcgctatcaaattgccaaccggcatgaggcacccactccctgagcgggcgacactcggtcgcagcgtcggtcgcggggagtgattttatctgtgccgctttcatcaccgataagggcaggcagggttcagtctgttgaccctcttttacagcattaaatcgaatattagtgctcgaggttaccagcgtgccattaacgtaaacgtcggcaagatagtctccggaaggcgtttgccgttcattaaaacgggcaatattttgtccgtaagtggccccctgaagtagcgcaggatcaaaataatactcttcactttgcgcggagcctgagcaaactatggcgatcaatagcgcaaggcttttgcggttcaaattaatggtgggggacatcgtagctctcgcttatccttgcgcccaggtcgttaaccaaagtaacggtgactgtaccggagaaggatttgagtgaccgtttgcccggcagccaccaggtttgactggagaaaggggcaatcatgtcagcatccaggttatacgaagcgccgttcacttttacattcaggttacttaaagaggcaaaccagggctgcggattaacaataacaataccgctttttccggaacccttatttaccgttttaatctgtagttttttcgccagattatcaggtttacctagcccgtcaggacgatagaaaagttttattcttgagcgcagcatcaccaacattttattttgcccgctgtcgctgccaatattcgttggtggtacctgtaatacgttaaaccagaatactgactcacgatcctgcggcaattttttcgtgttgttataaattacgcgtacaacctggcctgctttgggttgaatacgaaataccggcggcgtggcaatcaatggcatcgcgctgctattttccgggctggtattcatatcgccatcgtcaaaccaggtttgtacgatataaggtattgcatcattattttttaactgcacatctacggaggaggctgttgatgggtaaattattcggctacccaaaatagtaacgctcgcccacgatgctgtggcgggtagggccaggaatagaaaaactattaagtaatataatgcggaatgtcgggtatccattttcatctcaacaactccctagcgattgaaaatggtctggcgtttcaacgccagaccgtagcgacaattatttatacgaaacggcgtattgaagggtggcagcgactgtcccagcctctgctttcccggtagagtaataccgcgcggtataagtcgcgctcgcttcagaagcatttggttccagctgtaggtcgccgtcgccagtaaagccgccggtcagattgattggctcccctgaagtgtcgagtaattggacttcaacatttttcgcgctgccagtattacccaggttaccgttactggtgacctgattaccgacaaagacagtggaaatttttgttgttttgtcctgagagccggtacacccggacagcccaatatcaaacgttattggccccgcggttttcccttgttctgataaatctttagtacttactgttggtaataacacgacgggtttagcctgattaccattaataacgacagagcatgtttcatcagagacttccccttgaaaggtgatggtgttatcagaaacagccatcgcgctgctggagacaagaagtgagcctgtgatcattgctaaatattttttcatagacatatgataatgttcctgtattaatctttactttttcaggacgagtgcaattcgcccgaatgtttcgtgcttatggaggagtggtaaaaataacgatcattaactctatttttggatgtgagctataccctcctgactattgataatgcgatataaaacaaacagacttatttctcttatcatgaaatagagcgataagcgctttcgtccatacatctcattagtacaactgatagtgttatcatttgattgagtgtaatccgataacaattctctccgcatctgaatagatagactatgttgcaatacaaacctgcacatttttgctatgtaaaatccgtatcagttaaacctcccgatggataatacgatggtgagattaaggtaaattttctgaaatgtgcttctgaaacagtataattagtcttacttttttcttacttttggcctttcagaagtttcctgagtttgcgttaaggtaaagaaaagtgttcagatttacctataactgtttgatttgtaatgtgtaggtaatacttgtgtcaattattgtttactataagtgagacttataagttaaactcaggttaattagggggctgaattcttttttgagcatgataatatgtcgtctgaatgatggatgcagttacctttaggattgtcatgaatgaaactatatttttacttgataagcgtgttgtatttgatagtacgaagatgaccttatcgcatggtaatgagataatcagaatatcagaagctgagacccatctgcttcttgctttttggcatggtctttacaaaaaagaagatattattcattttgtttgggaaaatcgtggaggctgcgtctcagaatcaagttactataaactcattaatcaaatgagaaatgattttagtagcattggtctacagtcatctgacatcgtaactcgccctcgggtgggggtatcgctgtctgttgccattgaacctataaaaaaaatcacctccctaaaggtgagtgatgaaaacgttaaaggcaccacgactcgggagaacatattttacaaaaataaacgtcacagcgtatttgtggtattaacaggagccattcttctggcattgctctatggtgtatttactatatataaagcgcctgttcgtaacagccctgatagtttttttacatatcttggcgaatataacgattatgcaatctataaaacaaaagaggataaggtcacattaagtgaagtagtttttgcttttaactctctaaaaattaaaatttaccggcaaaatggacgccatctttattatatcagggagcctaatatgaatatttttctgcaatgcttaaatcctgttgaaatggcggtgccaaaatgtattacagtaaaagaacgttactgattatatttgtaatatttatcgccattgtcgcaatcggatcgataatagcgcttgagtgggtaaatcgtgactcttatagaaccaataatcttatatgcacgacaaaatcagaagcgtatattgcgccacgaaaattgtacatggatggtggacttgtgctggatcttaaatccggcaggattaccctacactacgatgttactaccgatacgaaagagaaacggcttttttttcgtgatatctgcatcagcaaactgcgcagaacgggtatgaaaacatttacttttaaagtcaattcagttaagacttttgagtctgatactgctggcgatttgttttcctggttgagactgttacagcctggtacgattaatgagttaaagatggtcaaaattgggaaaaatacctacatgttttcgcttaatcgacatttgtataatgtgtgtaccaccagtagtaacgttgagttgtagccaataatccctgtattgatgggaattcgttccgtgatttatgcctcatcaggcagcgaacctggtatcaggctaacatattgaatttagatatctgctatcgcttattctaacgatagtatcctgcacctgttgggtattgatattttcttgtctattttcggcacagggagtgccatcttgctatcattaagaacgtataacctatctctcaatattgcttttctatattaatgttactttagttatcctatcaaagcgtacagtggcaaaaggaaggccggtaagagggcaatgatttgaaagtaagaaagctatttctgatgttgtttattgccgttccactgatcgtaatgatattggtggggttactcgcgggtatcttccagctaaaacgagatatcgccgtcagcgccaatacgctgctgcggtttagcgcggatatatccgccgcctcctggcaagtcgccggaaaagccgccagactggctgagagttcctgcactgacacgctgaaagaactgtccagaacgcgggccttcactccttatgtccgtgacattggatttctggaaaatggtgatatcacttgctcctttgtcacaggaaccgaacgctatcatttttcccggctggcagggctttctttacctgcttcttatccggaacggtggttgcgatctatcggtagtatggccgaaggacccgatcgccttgttgtggtgtatgtgaaaaaagtagcagcggataaagcggctttcgtcattgtggattcgcagtatgtccaggagctcatggagatattggctgcagaaagagcatcagcctttagcctgacattcggcgcaggagaggcgattaccagcgctgcgaagttgcgcggtaaggcgtttttaacgcagcggttcacctcaaccgatcacactatccagctgatggtgcgaacccctttctcaacgttatcggcatactggttacaaaacctttttatttttattccgctgtcattgtgtctttctgtagggatgatgttgttctacaggcgctggtatttaaaacgcttatctctggcccgggagattgccaggggaataacgcacaatgaatttacggtacattatcaacctgtttttaatgttaaacacggtagttgcggcggcgtggaggcgctaatgcgctggccgcaaccggatggccgttttataactcccgatatttttattaccgccgcagaaaatgaaggcatgattattccactctctcgtcatctgttcgaactgattgctcatgacgtgataaactggactgtaccggatgatttctatatcagcgtaaatatatcgcctgcgcatcttatggatgacggttttatacaagatatagaggcgctcaggactcgtttgggaacgataacgcttatgttggagctcaccgaacgtagcctgattgtagaaccttcacaggtcgcagaaaaactttcaacgctccgtgaaaaaggcgtgttaatagcgattgatgattttgggaccggctattgctccctctcctatctccagcaattacctgtagactctcttaaaatagacagaacgtttatcgataccattgataccagcagcgatgatgttcctgtcctggatactatcattacgctgagtcagcgactgggactcaatgtggttgccgaaggggtcagtacccagcaccaattgcgttacatcttaagccacggggtaggattcgttcagggatttctttatgccaggccgatggggactaatgactttatgagttggcttggcaagtcagcccagcggcaaaatggtttgctcaagggggaaagcggatccgcgagcgatctggtggctgaataatgcaggaactcgctacggaaaaaaattcaatagcacgatatatcctggtaatatgtttatgccgtgaagaaacgtgatagcactggggcggatatttttatgagtcagaacaattatctgattgacaaaagggttattcttgattgtgaacgaatgacgctttcctgcgccggagagtcgataacgatatctgaatcggaacgcagtttgcttatcgctttttatgaaggcctttttaaaaaagatgatttaattaactatgtctgggggcgcaaaggtgtcgtggtctctgatgccagttattataaattgattaaccagctacgagggtcatttgataaaattggtcttaagggggcgtctgttgtgactcgccctcgcgtgggtgttttactctcagtttccattgaaccgttgagtgatgaggcgcaaaatacgccgttgcctgctgttgctgaaacagaagtatcgacggttgaagtgcggcacgatgacactattattaccccaacaccgggcgctgtgaataaaaaagattggctctacttttgcctggccgcgcttctgatgttttttatgatgtataaagttaagggtgaaaatattgattactttaccctccagggttcgtatgatggatacactttttatagtgtcgggcatgataaaacccatctgacggatatcgttgaagcgtactctgagatgagtaatgaaatacataaacaaaacggaaaaatcatttattacattcgtgtgcctaacacaaatatttttgtccagtgtcttaaccaacttgatatagcggagccgaaatgcatttccataaaagaacgttattaagcgtggcgacgcttggtatgctggctgtttcagtcgtactgatggtagtttgggtacgaaacagtaaccatagttctattaatactaatgaatttttatgtacgacaagaacggtaacgacgatacagcctaaagatatccatgccgatggcagtcttgttcttgattttaagatgaagagaattacgcttcaatatgaaataaaaacaaaagataacggtgtaaaaatattataccgggacgtgtatatgaaaaatttacatcgaacagcgcctggtgtttatacgttcgaagtatcccaggtaaaagtctttgccacggatacggctggcgagctgttatcacatttacgggttttgcatccggaagcggctaatgagattcgaatatctaaagtgggtgagaaaacctttttctattctcttaatcggcagctttataacgtttgtaccgcgcagtagatctgaatgttgtctgaatgcgtcagaaagcgagttgcgaaattgccctccgcaagggtaaaggttaactcgaacaccagttaaagagcattaaaaacaatgagttatgaattttttactcttcatggaggtaactgatactcgctgataacctctcgcagtccgcctgacggatgcgatgccaggatcgggtctgaagcaaccatgaatccgccattaataaaaaagtaagaactctgtaagactgatttcatatccattatcgaatatatcaggttatattacctccgcagttggcatgactggtaataagcgcattaggtgctcttaatctaaatgctatttgtgtgccataagttccggtaccgccttaattatatattaaaaatggagtggttttaatgaaaagacggtcttcgttccttgtttttttaggtttattattagcgtcacctttagctttggctaacgatcagcacaccgtatcgtttggttatgcacaaactcatctcagttcattgaaaaatagcgatagcaaagatctgcgaggctttaattttaaatatcgttacgagttcaatgagacctgggggatgttaggctcattcaccgcgacgcgcaatgaaatggagaactacacctggaaagaggggaaattgcataaaaatggttccgattctgtggactatggttctttgatgtttggaccaacatatcgttttaatgactatgtgagcctgtacggcaatgcgggtatagcgacgatgaaatttaataaacactcaaaagaagactcctttgcctacggcgctggcgtaatatttaatccagttaagagtatatctatcgatgcatcatgggaaaccagtcgtttcttcgctgtggataccaatacatttggtgtcagcgtaggttatcgcttctgatattaaaagtataagcgttacgtttatggcaaggaattaaaaataatatggcgctgctacagaatagggatggttatgagcgctcaggtaatcttaagaggaagataaaacactcaccgtagcgttattctattgatgaaattatgataaattcactatcggaacaacttccgttaaaaacgataggtatagttttaacggatgattattatacttatttaggcatcgcttcactctttgaggatgggaagtgctttatgttcccactcaatggagaatataattcgtgtcagatatcagctagcgaagatatcataattattattgatggacgagttttgattcagggggtctggaaaggttttaaggcgctcatgcagcattatccacatgctcgtcgaatctggctcacgcgcagagatattggaaaactttatccacatggctgcgatagagatcctgatatcgatcccgatttggcaaagcctgtttttattgagcatttcattaaatacgcttgtgcaaacgatgtagcggtcggtgaaattgcgccgttgacaaaaaaggaggaggagttgttatggcactttttatataaaaagtcgatgagtcagatcgccagtagctatggcatgagtcgtaagactttgtacattcatagattgcgtatctgtcgtaaatatggcttcaaacgcttttttcatttgctatttatttaccaaagaagtcgccatatcttcgcatctaaaatttgccgtgtagacaaaaacgccgatcaggcttgaagcaaacaagatgaaaaagttaacgatgagagagtgtgaaagcatcaatcctactatgctgcttgccattaagatacttatctcggcgcttgacgaaaaaacaaaaataagactcagagagcatattgaaaaaactgaacaagaaatagcctcaagcatacatgatagcatcatgacagagacttttcttcagcaaatgaaagacattcgttacatcttaaatatagttccttgacggcgttcagaagcaagaacgcgttattatttaatgattaatagaccaggtattagtatgaaaaagatcttagtatgtttcgtcggcttggctttaaccgcatgtagcgctaattcgttgaattatggcgctgaacaggtacgggtgatgaccagcgagccaggtaaggaatgcagctacttaggggatatcacgggcagccaggggaatttctttaccggtggctggacttccaacagtaacctggaaacgggtgcccgtaacgatctgaaaaacaaagcttataaaatgggcggcaatacggtagtcctgttaacccagcgtgcaggccagacaggaagttcatggcacggttcgggctcaagcaaacaaacgaatgtcacgttaagcgggaacgtttatcgttgccctcgttaaccttattttgcaggtaatatatgcctgtttagcgcgcgcgccgcactggcgacgcgggcgctatttgggctaaccttgctttttctcactgtattcccgccaaccgccgcctaatgctttatacaggttaatgatatttaactgttgcatgagacgtgtgcgtaccaggcgctgttgtgcgccataaagcatacgatgggtatcaagcagcgtaaggtagtcatcgacgccttcctgaaaacggagtccggccagctcataggcgatttgactggcttcaaccgcgcgttgttctgattgcacctggtcattcagcgtacgctgtcccgccagaccatccgccacgtcgcgaaaggcttgctgaataacgttttcatacctggcgatttcaatctgtttttggacatgcgccctatccaggtcagcgcgtaatgcgccgccgtgaaagagaggcaaggtgatttgcggtagaaaacgccagcttcccgatcccggttcaaagagtccgctaagagacgcgctggccgttcccgccgagcctgtcaggctgatggtcgggaagaaggcggcgcgcgctgcgcctatccgggcgtttgcgccgcgcagcctgtactcggcggcgcgaatatccgggcggcgtaccagcagatctgacggtaatccgcctggcagtgtggtcgggatcgcgccttctgtaagcgtgaccgcttcgtttagtcgacgcgacagttcaggcgtgagcggctggcccaacagcaattccagcgcgttacgatcccgcgccaactgtcgcgtatacgccgcgcgattgatttcggcagaacgcagcgcgatctccgccatacgcagatcgagctgtgtggcgttacctgtccgggcaagctgggtcgtcaatgtgtatgaacttttttgcgcggccagcgtatcctcggttaagcgcagcagctcccggtcagcccgtagcgtcagccaggcgctggcgacttcggaaaccaggctcattcgcgccgcaatgtacgtctcatcaagcgccatataggcggctaatgcctggtcgctaaggcttcgcactcgcccccagagatccagttcccaggccgtcgtcgccccagccgcctcgtagcgtcggttaatctcagactcgtccatgacgctgagatcggcgggagtgcgactggcgtccatggcggtggcgatgccgagcgtcggcagcatctccgcgcgctgaatgcggtataacgcccgggcggcttcaacattgagccctgccttgcgtaaatcccgattattgcgtaacgcgatcgcaatcagttcctgtagaagcggatcgtggaagaaatcacgccagccaatgtcagcggcatccggcgcgccagaaacggttgacgttgcgtagggatagaccatcgcagtcggcgatgcggggcgttcgtgcttcggcgccatcgtacagccagcaagcgtggtgacgaaagcaagcgtcgccagcgtggcggtctgccgatagcctgtaaaagtgatcttcattatgccattcccatcattatgcttgctgatcatgcgaatcaacgcggttctcacgctttaatgccatcctgcgaaccaccacgtaaaatacaggcgtcaataacaggccgaagagcgtgacgcccaacatgccggcaaacacggcgatgcccatcgcatgtcgcatttccgcgccggcacccgtcgcgagtaccagtggtactacacctgcgataaaggcgaatgaggtcatcaggataggacgcagacgcaggcgggacgcttccagtacggcggtcagcgggtctgcgccgtcgtgttctttggcgcgggcaaactcgacaatcaaaatggcgttcttggccgccaggccgaccagcaccacgaaaccaatctgcgtaaagatattgttatctccgccagatacccacacgccgacaatggctgagagtaatgacataggcgcaataagcaggacggcgaagggcagcgaccaactgttgtactgcgccgccaggatcaggaaggccagcagcaccgccagcgcaaagatagcaagcgcagagttgccggcctgtttttcctgataaaccagatcggtccattcgaagaccatcccttccggtaacgtttcacgcacgatcttttcaatcgcgtccgtcgcctgtccggaggagaagcccggagccggtccaccgctaatatctaccgaggggaagccgttgtaatggatgattctgtccggccccgactggcgcataatcgtgacgaaagcgctaagcgggatcatctcgcccttcgcattgcggactttaagcaggccgatatcctcttgctgcatacggaatggcgcatcggcctgcgccatcacccgccaggcacggccaaatcggttgaaatcgttgacgtaaagcgagccgaggttaatttgcaacgtttcaaagatgtcggtgagcgatacccccattgatttcgcctttacccggtcgatatccacctgtaattgcggggcgtttgtctggaaactggccagcatattggccagttcgggcgtctgcatcgccttagacataatctcgctttgcacctttgtcatcgcttcaaatcccagttccgcacgatcttcaatctgcaatttaaagccgcccgtcgcgccaagccctggaaccggcggtggcgggaagatgccaataaatccgtcgggaatgtggctaaatttgtgcattagctttccggcgatagcgttagcggaaagcgaaggatcttcacgctcgtcaaagggtttcagcatggcgaacatcagcgccgaatttggcacatttaccgggccgttaaccgacagaccggggaagacgacgacgctttcaacgccgggttccgccagcgcgatagcggacatctgtttcacgaccgcctctgtgcgatccaacgatgcgccgcttgggagctgggcgatgccgacgagatagtatttatcctgcgcaggcacaaacccgttcggcacctgatggaagccaagccaggtcagccccacaaagccagcatagagcaccatcacaatgacgctgccgcgcacggcccgacggacggcgctaacatagcggttcgacgcgctgtcgaagaaacggttaaagcgatggaaaaaaccgccagtgaccgtgcccatcaaccgcgttagccagtcagccttcgcagtatcgtggtgcggtcttagcaaaatggcagccagcgcaggggagagcgtcagcgagttaatggccgaaaggatggtcgaaatagcgatggtcaacgcgaactgacgataaaactcaccctgcaggcccgccaggaatgcggaagggataaagaccgccgttagcaccgaggtaatagaaagaatgggaccagtgacttcatccatcgccttctttgccgcctctccgggacttttgccctgcgagatatgccgttccacgttttcgaccacaacgatggcgtcatcgacaacgatacctatcgacaggaccaaaccaaacagcgaaagcgtattcagcgaaaagccaaacaggtgcatcaaggcaaaggtgccgaccagcgaaacgggaaccgccaccagaggaataatggacgcccgccaggtttgcaggaacatcaccacgacaaggacgaccagcacgagggcttccagcaacgtaatcgccaccgattgtagcgatgcgcgcacgaagaccgtaggatcataggcaatccggtattcgatatcctgcgggaagttttgctgcaactcatccattttgccgcgaatcgcgttagaaacgtcaatcgcattggcgcccggactttgaataatctgtaacgctggcgccgcttcgccattcagtaaactgcgcagcgtataggcatctgcgcccagcgtgacgcgggcgacatcacgcagacgcgtcacctcgccgtcagcgccgatttttaccacaatctcgccgaactgttcttcgctggtcaggcggcccagcgtgtttaccgtcatctgaaaagcggcggaggcctccggctgttgcccgacggaaccggcggcgacctgtacgttttgttcccgcaacgccgtaacgatatcactggcggtaagaccgcggttggcgattttcgccgggtccagccagacgcgcatggcgtactcgcccgcgccccagacgagaacatcgccgacgccgggtaaacgggccagttcgtcgcgaacctgccggatggcgaagttagacaggtaaagcgagtcatagcgtttttgcggcgagacaagatgaaccaccatcaacatatcgggggacgttttctccgttacaacgccaattcgctggacttcttcgggcaggcgaggcagcgcgcgggatacccggttttgcacctgaatttgcgccatatcaggatcggttccctgttcgaaggcgatagagataaccatgcgaccatcaatggccatctgggtattcatatacaacatgccgtcaacgccgttgatcacctgttccagcggcgcggctaccgtatcggcaatcacttgcgggttagcgccggggtagctggcgctaacctgtaccgtgggcggcgtaacggccggatattcactcagcggcagttttaaaaaggcgatagcgccagccagcagcattaacagcgacaggacgatggcgaagatggggcgtgcaatgaaaaagtgggtgaatttcattggcgcaccgccttcggcgcactgtcgccgtccgctttagtcaatgtcgcggtctgtttgtcggtcacattctgccgcatcggcaccagacgtggcgcaacggtcatgccaggacgcaccagccccttgaggatgattttttctcccggcagtactccctgtgtaacgacgcggaatccatcgaccatttgtcccaactcaaccggacgatactccacctgattctccttgccgacgatcagcacatagtttttgccctgatcggcgctcaccgccagatcgtcaatcagcacggtttcccgcggctcgccgatgggcaaactgattcgggcaaacaggccgggagaaagcattccgtcggggtcaggaatcacggcgcgtgcccggatagtgccggtgctgcggttcatctgattgcccataaagtcgagtacgccctgataaggcagcccgttatcggtggttaaccccatgttgactaccggtggatttttgtcggagcgggtatgccgtaacgccttcagccaggtggcttcgtcaatatcgaaatacacatacatgggattgtgagacacgatagtcgtcagaagcgtggcgttacccgctacgccgccgctgaccagattgccccgggtcaccagtatgcggtcaacgcgtccggcaatgggcgcggtaatacgggtccaggagagttcaaggcgcgctgcggcgacggcggctttggccgattgcatctgcgcctgtcgcgcattacgcgtggcggtgacatcgtcagcgtttttacgtgatacggcgccgctggcgaccagtcgttgaatgcgatcgaaatccgcctgcgcctggcgggccagtacttcagcctgacgtaattgcgcgacggcggtgtcgagggcgacctcgaacgggcgcggatcgatctggaacagcagttgtccgcggcttaccagacgtccttccggaacgctgatggcgtcaagggttcctcccacgcgcgaacgcagctccacggtttccggcgcggccagaaaaccggtgaattccgccgtaggcgcgagtgtacggctaagggctttagcaaccggtaccgacggtggaggcggcgcgctggccggggggccgacggcgttgtctttatcccatagtgcttcgccggccatgtaaatcacgcccccgatggcggcgatgacgccggctatcaacataattttgaatgttctacgcatgtcgtttccctctttaccgcagcgtgtcggccattccgcaacgctgccgcagaatttttggcaaaggctaggcgttacaacgaaggaaaggtcaagcgttcctgacgggtttttacggggcgtgggtcggcatcgtggcgtaaatgtctcgcatcatcctcttttatgagccatctcacattctcgccgaaccgtgcagcctgaatacgcttgaccttcccacaatggcaagctttaggctttctgataccgaatagtcaggatggggaagtcgtcatgagtcagtcagaaaatcgtcacgacacgataagcttacttattgaaggtatgacctgcgcgtcgtgcgtcgctcgcgttgaaaaaggtattaaggctgtgcctggcgtaacggacgctacggtgaatctggcgacggagcgcgccaccgtccgcgggacggcgtcggcggaggcggtgatcgcggcgattgaaaaaacggggtataaggcgcgaccgatagagacggcggggcagggcgaagacgactctgaagagaaaaaagaggccgagcgcgtcaggctgaagcgcgatctgattctcgccagcgtgctggcgctccccgtttttgtgcttgaaatgggctcgcaccttattcctggtatgcacgagtgggtgataaaaacgattggcctgcaacaaagctggtactggcaatttgcactgaccctgttggtgctgacgatccccggtcgccgtttttaccttaaagggttcccggcgctggcgcgtctggcgccggacatgaactcgctggtcgccgtgggaaccgcagcggcattcggctactcgctggtggcgacctttacgcccgacctgttgcctgaagggacggtaaacgtctattacgaggccgccgcagtgattgtcgcgcttattctgctggggcgctttctggaggcaagggcgaaggggcggacttccgaagcgattaaacgtctggtggggctacaggcgcgggtcgcgcatgtgttacgcgagggccgcatcgtggatatccctgtcgacgaggttgtgctgggcgactgtgtggaggttcggccaggcgagcggatcccggttgacggcgaagtgaccgaaggccgcagcttcgttgacgagtcgatgattaccggcgaaccgataccggttgagaaatccgcaggaagcgcggtggtgggcggtaccgtaaaccaaaaaggcgcgctcacgctgcgggcgaccgccgtcggcggacagaccatgctggcgcaaatcattcgtctggtggaacaggcgcagggttcaaaactgccgattcaggccgtcgtggataaagtgacgctgtggtttgtcccgatggtgatgcttattgctgcgctgacctttgtggtatggctggcgtttgggccgtcgccagcgctgactttcgctctgatcaatggcgttgcggttctgattatcgcctgtccttgcgcgatgggcctggcgacgccgacctctattatggtgggaaccggtcgtggggcggaaatgggcgtgctgttccgtaagggggaggcgttacagctactcaaagacgctaaggtggtggccgtagacaaaaccgggacgcttaccgaaggccgcccggtactgaccgatctcgacgtggccagcggctttgaacgccgtgaggtgctggcgaaagtcgcggcggtagaatcgcgttcagagcatccgattgcccgtgcgattgtcgtgtcggcagaagaggaagggatcgcgctaccaggcatgagcggcttcgaatcggtgaccgggatgggcgtatacgctaccgttgacggtacgcgtgttgacgtgggggctgatcgctatatgcgcgaaattggcgtggatattagcggcttcgccaccaccgccgaacggttagggcaggaagggaaatcgccgctctatgcggctattgacggtcaactggcggcgattatcgccgtggccgatccgatcaaacccagtacgcccgccgcaattaacgctttacatcagctcggcattaaggtcgccatgatcactggcgataatgcccgcacggcacaggctatcgccagacagttaggaattgatgatgtggttgccgaggtattgccagaagggaaagtcgaggcgatacggcgcctgaaagcggcgtatgggcaggtggcgtttgtcggcgatggcatcaacgatgcgccagcgctggcggagtccgacgtggggctggcgattggcaccggcaccgatgtggcggtggaatccgccgacgtcgtactaatgtccggcaacctgcaaggcgtgccgaatgctatcgcgctgtctaaagcgaccatccgcaatatccaccagaatctgttctgggcctttgcttacaatacggcgctgattcctgtcgcggcaggcgcgctatttccggtctggggcatattattgtcaccggtattcgccgcaggggcgatggcgatgtcgagcgtgttcgtgctgggcaacgctttgcggctgcgccgtttccgggcgccgatggcaaccccatccgacacatccacgacatgaggaggagcgtcatgaacatcggtaaagcagctaaagcatcgaaagtctcggccaaaatgattcgctactatgaacagattggtctgattcccgcggcaagtcggacggattccggctatcgggcctatacccaggctgatgttaatcaattgcattttatacgccgcgcgcgcgacctcggtttttcagttgctgaaatcagcgacttactgaatctttggaataaccagtcgcggcaaagcgctgacgtcaaacgcctggcgcagacgcacattgatgaactggacagacgtatccagaacatgcagcacatggcgcaaaccctcaaagcgctgattcactgctgcgccggcgacgcgctgccagattgccccattctgcatacgcttggacaacctgacgatagcgagccggaggcgcgtaccggagcggtattgcgacgtcctcgtcgccacggactggcaaagcgtctgtaagtcctgagattacgcttgaccttccaacactggcaaggtccagactggcaacagttcccacacaaaaggagttcactatgcagttccatattgatgacatgacctgcggcggctgcgccagtacggtaaaaaagacgattctgactctcgatgctaatgcgacggtgagaactgacccggcgacgcgtctggttgacgttgaaacgtcgctatccgcggagcagattgccgccgccctgcaaaaggccggtttcccgccgcgcgagaggtaatcgtcaatggcgatcggtctggcgacaggccggtcgcgatacgctagccacgcttcgcttttctttgcgtgagataatccccataaaaagtgtgacaaatcatgtgtcagtaagctttgttaataatatgtaatgatttgtctatttttgctaacattttacctgctatatacaaaaagataacaaataagtagcgcaacgctaccttgttacgtcgctttgacgacgggagcgctccagcgtttcgcccgcttcaaagcttgatgttattttttgatgcaggacactacctatgtacacccccctgaactggacgacgacacaacgacatgtggcgtttgcctgctttaccagttggatgctggatgcgtttgatttctttatccttgtctttgtacttagcgatctcgccgaatggtttcacgcttccgtatcggacgtttccattgcgattatgctgaccctggcggtacgtcccattggcgcgctgctatttggccgaatggcggaaaagtacggacgtcgaccgatactgatgctcaatattctgttttttacggtgtttgaactgctttccgcctggtcgcccaccttcatggcatttctgatttttcgggtcatgtacggcgtggcgatgggcgggatatggggcgtcgcgtcatcactggcgatggaaaccattcccgatcgttcgcgtggcctgatgtcgggcatttttcaggcgggctatccctgcggctatctgttcgcctcggttatttttggcctcttctacagtatggtaggctggcgcggtatgttcctgattggcgccctgcctgttgtcttgctgccttatatctggtttaaagtgccggaatcccccgtctggctggcggccagagcgcgtaaagagaataccgcgctgcttcctgttctgcgcaaacagtggaagttgtgtctgtatctggtgctggtcatggcgttctttaactttttcagtcacggtacgcaggatctctatcctaccttcctgaagatgcagcatggttttgatccgcatctgatcagtatcattgcaattttttataacattgccgccatgctcggcggtattttctacggtacgctatcggaacgtattgggcgtaaaaaagcgatcatgatcgccgcctttcttgcgcttccggtactcccgctatgggcattttccagcggatcattcacgattggtctgggcgcgttcctgatgcagtttatggtgcagggcgcctggggtgtcgtgccgacctggctgaacgagctggttccggcgaatgcgcgcgccgtgctgccagggtttgtttaccaactcggtaatttactggcgtcggttaatgcgacgttacaggcccgcatcgcggaaacgcatggtggcaattacgggttggcaatggcgatcgtggctggcgcggtggctattttaatctgtgtatttgtggcatttggtcgcgagacccggggagtcgtcatctccggtacagatagcgacgccctcccggagtcggccatcagtcatcgcacgtaaacactacgctcctggcgcatactgtcgccgggagcacgccttcctcccgtcgttttcacgccctttcaacgaacaacaaaggttaatgatggcatctgccgttcgtgaccattacaatcatcgcttacttttttctttataagaaattgattgctgcaccttaaaattatcaacggagcgaagatatcatgttgaaagataaccaaaaacacaacgagtctgttgccccgaatagcgcctttctgtctgagttacaacgtgcattaccggaattttttaccgccgatcgctataacgagcagggcgaactgatcgcgaaaggcggatttgatctcgccagatttgagcgcgcgctgaaagcgcgtaatattgatgagctgactagcggttatcagattgattttattggcaaagattacgcaaaaaaacaggcgggtgaaaaatccgttaccgttatcgttcctgacgtggaacacaatactctggcagaaaataaaaacagccataatctttttctgaccggagataatctggatgtgttacgccatctgcaaaataattacgccgataccgtcgatatgatctatatcgatcccccttataacaccggatcggacgggtttgtctatcccgatcattttgaatatagcgatcgggcgttgcaggatatgtttggtcttaatgataccgaactggcacgtttaaaatccattcagggtaaatcgacgcactccgcgtggttatctttcatgtatccgcgtcttttcctggccaggaagctcctgaaagataccgggtttatttttatctctatcgacgataatgagtacgccaatcttaaattaatgatggatgagatttttggcgaaggcggatttgtcaccaatgtgatgtggaagcgcaaaaaagagatttctaacgactctgataacgtttccatccagggggaatacattcttgtttatgccaaaaccggtcagggcgctttacgtttagaaccgctttctaaagagtatattcagaaatcctataaagaaccgaccgaacagtttccagaagggaaatggcgaccggtgccgttaacggtgtcaaaagggctgagcggcggcggctatacctataaaattaccacgccgaacggtacggtacacgaaagactatgggcttatcctgaagccagttaccaaaaactggtggccgataatctggtctattttggcaaagataacggcggtattccccagcgagtcatgtacgcgcatcacagtaaggggcagccaacgaccaattactgggataacgtagcgtcgaataaagaggggaaaaaggagattctggatctcttcggcgacaacgtttttgatacgccgaaaccgaccgcattattgaagaaaatcatcaagctcgctatcgataaagacggcgtcgtcctggacttttttgccggttccggcactacggcccatgcggtaatggcgctgaatgaagaagatggggggcagcgcacgtttattctgtgtactatcgatcaggcattaagcaataacactatcgcgaaaaaagcaggttataacactattgatgaaatcagccgcgagcgaattacacgcgttgcggcgaagatccgcgccaacaatcccgcgaccaatagcgatctcggttttaaacattatcgttttgccactccgacacagcagacgctggacgatctggatagcttcgatattgctaccggccattttatcaataccagcggtcaactggccgctttcaccgagtcaggatttaccgacatgatcaatcctttttccgccagaggattgggcgtgccgggcggcgcaagcggcgaagagaccttattaacgacatggctggtcgccgatggttataaaatggatattgacgtacagaccgttgatttttccggctattgcgccaggtatgttgataatacgcgcctgtatctgattgatgaacgatggggaacagagcagacccgcgatcttctcaaccacattggtacgcaccagcttccggttcagaccattgtcatttacggctactctttcgaccttgaatccattcgtgaactggaaatcggcttaaaacagcttgatcaaaaagtgaacctggtgaagcgttattaagaggggatgatgatgaatattttactggaagaacttccccatcaggaacaggcgttagcggcgattctggcgagtttcaccggtatcgatcacgcgcaagccgatcataatcactatgctaatccgctgattaaggaacgttacgacgataaggccaatattgacgttaaaatggagaccgggacgggtaaaacctatgtctatacccggttgatgtatgaattgcatcagaagtatggcctcttcaaatttgtgctggtggtgccgacgccagccattaaagaaggcgcgcggaactttattaccagcgattacgccagacagcatttttcacagttctacgaaaatacgcggatggaactttgcaccatcaacgccggtgattttaaagtaaagtcggggcgtaaaaattttccggcccagctattaagttttactgatgccagccgtcgtgatagccatacgattcaggttttgctgatcaatgcgcaaatgctcaattccgccagtatgacgcgagacgattacgatcaaacgctcctgggcgggctgacgtcgcctgttaaagggctgcaaatgacgcgaccggtggtcattattgatgaaccgcatcgttttgcgcgagataacaaattttatcgagcgattcaggctattcagccgcaaatgatcgtccgctttggcgctaccttcccggatattgtcgaaggtaagggtaaaaataaatgtgtacgtaaagattactatcgccggcaaccgcagtttgatctcaacgcggtggacagttttaacgatggtttggtgaaaggtattgatatttattacccgaatctccccgaagaacaggccaacaatcgttatatcgttgacagcgtcacggcaaagaaattaatcctccgacgggggagcaaaattgccgaggttggcgtgggcgaaaatctcgccgatgtcgatgcaggatttgaaggcagtatcgaatatgccggcagtaaaatgttgtcgaacgatctggagctggaggcagggatggcgctggtgccaggaacctttggcgcgagctaccaggaactgattattcaggacgctatcgataagcattttgacactgagcaggcaaatttcttacgcagcaatgagccagaaaataatgccccgcgtattaagaccttaagccttttctttattgacagtattaaaagctatcgtgatgacgaaggctggttgaaagtcacttttgagcgtttgctgaaaaagaaactgacgcaactgattgacgattatcagcgcaagaccctgccgcgagaagtggagtatctgtcgtttctgcaggccacgctcgccagcctgcactcggataaccaaaacgtccacgctggttactttggcgaagaccgcggaagcggcgatgaggcgatccaggctgaggtagatgatattctgaaaaataaagagaagttgctcagtttttcagaccatcacggcaactgggaaacgcgccgctttctgttttcaaaatggacgcttcgcgaaggctgggataacccgaatgtttttgtcattgctaaattacgttcttccggtagcgagtcgagcaaaattcaggaagtggggcgcggcctgcggctaccggtagatgaaaatggtcatcgcgttcatcaggaagagtggccgtcccgactgtcgtttctgattggttatgatgaaaaagcgtttgccagtatgctggttgatgagattaatcgcgacagcaaagttcagcttaacgagcagaagctggatgaggcgatgatcacactcatcgtcaccgagcgacaaaaagtcgatcctgcgtttacggagcttcgtttgctggaagatctggatgataaaaaactgatcaaccggagcaatgagtttaaacccagcgtcacgcttaacggggaaaccaaaagtggttttgcgtggctactggagttctaccctgagctgacgcaggcgcgggtgcgagcggatcgcattcgtgacaataagcccgcctcccggctgcgagtcaggttacgcaaagagaattgggaacaacttagcagtatctgggagcagttttcccgccgttatatgctgcaattcgagcgtagcggcgcttctctggaacaaattgccgccgaggtgctgcgcgatccggcgctgtatattcgccagaagccaagccaggtgcaacaacggctggtatcgaatgaagataatggccgttttgaagtggcgcagcgggaaggcgaattagccgccagcgaatttatggcgggcatgaaatatggccattttcttaagcaactggcgttacgcaccagtctgccggttaacgtcctgcacccggtgttaatggcgatgctgcgtgatgttttgcacggagattcacgctatttaagcgagatctcgttggacaatatgacccgcgcattacagacgcggattaatgcgcattttgcgcagcgccacgattatctgcctctcgattttcaggcttcaacgtcggtatttgattccacggcacggcagttcagagaggagattagcgctgaaattgtggggaaaaatgtggatgagaatgcgatagacgatccccgttctctctatcaaataccgccgttgcgttatgacagcgtcgatccagaattgccgctattaaaatacgattatccgcaacaggtttctgtgtttggcaaactgcctaagcgggccattcagatccccaaatatacggggggctctactacgccggattttgtgtaccgtattgagcgtcaggacgccgacagcgtttatttactggttgaaactaaagcagaaaatatgcgcgtaggcgatcaggttattcttgatgcgcaacgtaaattcttcgatatgctgcgtcggcaaaatatcaatgtcgagtttgcggaagcgaccagcgcgccggcggtattttctacgatcaatggcttgattgaggggaaggcaaactaacgggtttgaatgaaccttaacggttatctttttgatagaccatataaaatggccgccgcgcagcgagcgttgcggtcattctccctgtgctaatcccccgtcccgtaaaccgcgttgacttgaaggttatcgttttacgtctattcttaactttcagctacgcgtattttgctgaaattgcaaatagtcttgaagacgctgtttttttgttttgccgttatttttataacggccaggtagatattgccaagtgaatgtaactaagggagacatgttatgctaaatagatactaccgtttcgctgtcgaaaaagacgacccctccgaagcgccagagtcgggcgataagcctgacagccagccgcaaaaaaaatcgtaatttatctggatattccccgacgtttatacgtttggggaaaataaccgtttcgtttcaacctggttgcgaacagtgaatattttacacgaagtgactatatataaacgggagggaacatggagtttgatgccttctttttagcgagactccagtttgcctttaccgtctcttttcatattattttccccgcgattacgattggcttagccagttacctggtggtactggaaggtttatggctaaaaacgcgtaatcctgtctggcgctcgctctatcagttctggctcaaaatttttgccgtcaacttcgggatgggcgtggtctccggtctggtcatggcttaccagttcggaacgaactggagcggtttttcccagttcgccggcagtatcaccgggcctttattaacctatgaagtgctcaccgcattcttcctggaagcgggattcttaggcgtgatgctttttggctggaacaaagtcgggccgggtctgcatttcttgtctacctgtatggtggcgttgggcacgttaatgtcgacgttctggattctggcgtctaacagctggatgcataccccgcagggatttgaaattcacaacggtcaggtagtcccggtggactggttcgcggtgattttcaacccgtcgttcccgtatcgcctgttgcatatgtccgttgcggcgtttttaagtagcgcgatgtttgtcggcgcgtccgctgcctggcatttactgaaaggtaacgatacgccggctatccgccgtatgttctcgatggcgttatggatggcggtcgtggtggcgcccgttcaggcattgattggcgatatgcatggccttaacaccctgaagcatcagccggtcaaaatcgccgcgattgaggggcactgggaaaatacgcccggcgagccaacgccgcttacgctggtaggctggccggatatggaggcggaacggacccgctatgcgcttgagatcccggcgttgggcagtctgatcctgacgcatagcctggacaaacaggtgcctgcgctaaaagattatcccaaagaggatcgccccaactctaccgtggtgttctggtctttccgtctgatggtgggcatgggcgtactgatgatcttcctggggctggccagcctgtggctacgctaccgacgccgactgtatcattcgcggccctttatgcactttgcgctgtggatggggccgtccgggcttatcgccatccttgccggatgggtgacgacggaagtaggacgccagccgtgggtggtctatggcctgctgcgaacgcgtgatgcggtttccgcgcacagtaccttgcagatgagcatcagtttgctggccttctttgtggtctattccctggtctttggggttggctatatttatatgattcgccttatccagaaagggccgcagccggcggagacaccgaccgctgaaaccgatggcagacccgcgcgtcctatctctgccgtgggagaatcgcttgagcaggagaaacgcgaatgaccatcgatcttccggttatctggtttgctattatcgtgttcgccacgctgatgtatatcgtaatggatgggttcgatctgggcgtcggtatcctgtttccgtttattcgtgataaacacgatcgcgatgttatggtgaactcagtcgcgccggtatgggacgggaacgaaacctggctggtgctgggcggggccgggctttttggcgcgttcccgttggcttatgccgtcatcaccgacgcgctgactatcccgctggtggttatgctgcttggtcttatctttcgcggcgtcgcttttgaattccgttttaaagccaccgagtcgcatcgcgcgttctgggataaatcctttatcgtcgggtcaatcctggcgacctttgcccagggggttgtggtgggcgcggtggtgagcggttttcaggtggaagggcgaacctttagcggttcgcagcttgactggctgacgccgtttaacctgttctgcggcgtcggtctggttgtcacctacgcgctgctgggcgctacctggctgattatgaaaagcgaagatccgctgcatagccggatgtgcgcgctgtcgcgcccgttgttgatcgtcttgttgttggtgatgggaggcgtcagcgtgtggacgccgctcacccacgacgacatcgccgagcgctggttcacgctgcccaatttatactacttcctgccggtgcctgtgctggtgttggcttttagcgtctggctatggcgcagcgtgaaaaaaccagaatcccatgcgcgtccatttattctcacgctagggctgatttttctggggttcagcgggttaggcatcagtatttggccgaatattattccaccggatatttcgctgtatgccgccgccgcgccgccgcaaagtcaaagctttatgctggttggggcgctgataatcatcccgattattctggcttataccttctggagctactacgtcttccgtggaaaagtgcgacatggtgagggatatcactgatggttaaagtgaaaaaatggtcgcggcgagtcgtatggatggtcgcgatatggtgcgccagcgtgcttctgctggcgggcgtcggaatgttattcagactgctcatgacctccgcaggatttcgctcctgactgatacccccggacgcgctttcgtcgctggcgaaagcgcgtttttatcgacagatcggcgtttatcgatcacctttgctcgccttatctctcccctcaatagcggttgataattattctcatctttattgtcgttcccgggccgcagtgatatggttacacagtggctaacgctctggtataacgcagataaacggtattgataatgtctccgatctcctgtcactcttccgccgccccggcgatgaaaaagatcttttccgtcagcgacttcatcgcgtttggcgagcgttatggcattgattaccgcttccctgcgttaccgcagtatacgcagagtagtcccgtacttcatggcgatatcgaagagatagcgcttcccggcgggatttgcattacacgctcggatgttcacgtgttacaaccttatgaaaccacctctcgccatagcagtccgctgtatatgctggtggtgttggaaggtaacgtcgcgctggctgtcaatgagcagacctttttgttgagcgcggggatggcgttttgctcgcaactgagtgagcagcagacgatacgcgcccatcacggcgcagacagtaaattgcgcaccttgtcgctgggaatgtacccggacggcggatggcgggagcgtttgcctgtctcgctggcagacgagtgggaaaatagcgcaacctcggcgagggtctggcaggtgccggagtttctgctttcggggctacgttatgcgcagcagcccggacctcatgcggcgtcacgccagttaatgctggaaggcatcatgctgcaattgctgggctatgcgctaaatctatgtcagccggcaacgcaaaaacgcgggcttcccgtcaccggtgaataccagcggctggagctcattcggcgtttactggagcagacgccggaaaaagcctacacgctgaacgaactggcgcgtcgggcggcaatgagtccaagtagcctgcggtgcaagtttcgccatgcctatgggtgtaccgtgtttgattatctgcgcgattgccgcctggcgcgcgcgcgtcgttatctgatggagggatacagcgtgcagcaggccgcctggatgtcaggctatcaacatgccactaactttgcgacggcattccgtcggcgttatggctgctcgcccggcgagctgcgtgacgcgtctcttacggcgtcccgccactgtgcgtaacgcgccccgccagagcggtaatatccgccgctaacccggttttctgccgctttgggtgattttttatcattgcgcataggcaatctggcgttacgcatagtggtccgtcatctctaaaaggtaataattcttatttacaataaagatgcctttggagatgttcatgtttgcgacaacgcgtatggcgctattgataggcggagctatcggcggcgcgacttttcctctttttgcccaggaaaccacaaaaaatgataccgtcattgtcacctcgcccgttcagagtggcgcgaccaagctggcgacgccagatattgaaacgccgcagtcggtatccattattacccgccagcagtttgaagagcagggcgcaaccagcgtgcgtcaggcggtcagctacaccccaggcgtatacagtaaccagataggcgcctctaaccgctttgattacatcgtattgcgtggtttttcggacggtagtctggataacgtctatctcgacgggttaaaaatgatgggcgacaccaattcgcacagttcgttggtggttgacccctggtttctggaagatatcgaggtggtacgcggcccggcgtccgttctgtatggacgttcatcgccaggcggcattgtcgcgctgacgtcgcgaaaaccggcgtttgatgccggaggagaagtgaagctgtttgccggcaataacaaccagcgcggggcggcttttgatgtgaccggcccactggatgacaatgaacgtgtggcggcgcgtcttagcggcatgacacgttacgccgattcgcagtttacccccttgaaagaggaacgttatgcgctgatgccgagcctgacctggcgaattaccgatcggacgcgtcttgatcttatggcctatctgcaccgtgatccggaaggcggtagccactccggactgccttatcaaggcacggttgtaccttataacggcggaaaaatttctaacactttctttgaaggtgaagatgactacgacaaatacgatcgccgtgaaaatatggtgggttataacattgagcatctgttcgataacggctggtcggtacggcaaaaattgcgctatttgcataccaaagtgacgttgaatcaggtctatgccgcaggttggttgaatgaaacggcgctgaatcgcggctattccggctccggggagaaaatgtcggctatcgcgctggataatcagctcgacggcagcgtggataccggggcgattaatcatcgtctgctggtggggatcgattatcaggatcgcagtaaccatactactggctattatggcgcgtttccgccgattgacgctttcaaccctgtttatggcgctcagccggattacattacgttgtatagccgtgaaaaacataagctgcggcagaccggatactatttacaggatcagatgtcatgggatcgctggcgctttacgttgggcggtcgttacgatcgggtcagcgtgtctaacatcgacaaacttcatgattcacgcagcgatctcgataaaaacaacgtcagtacccgtgctgcgttgctttatctgttcgacaatggcgtcgccccctatctcagttattctaccgcgtttacgccgaccagcttcgccgacgaaaacggcaatgtgctggaaccgatgaaaggcaagcagtgggaggcgggggtaaaatacgaaccgccgggggggaatagccagtttagcgccgccgtgtatcgtattaatcagaccaatatcgcgaccaaagaagaacctaccgatccgtaccgctcgattggtgaaattgagtctaaaggggttgaactggaggccattagccatttgtcggatagcgtccgtttgcaggcggcgtatacctatactgatatccgttataagaaaagtagcccgcaagaacagggtaagcgcgcggtttatgctccacggaaccaggccagcgcctggctaagctacgatgtgaaaagcggtctgttagaggggctgactttgggctccggcatccggtacgtcaacggcgtgaccagcgatcgcctgaatacccacacattgccgtcctatacactggtcgatatggtggtagggtatgatttatccagcattgggttaaatggcttgagcgcccagctcaacgtaaataacctgacggacaaacgctatgtcgctgcctgtaattcgctctcttattgttattttggcgccgagcgtagcattgtaggcagcgtgtcatgggcgttttgataacgcttatcgtccggtagcaaaggctaccggacaaacattagcggtgcgtcacgccttcatagagaagtctgagcgcaaacatcccgataatggcgccgataacacggctggcaatgcgctgtattcgtccataagcgcggcggactgcggggagcgaaaaggcctggctgagaaaaatacgccagataacggatgacagcacaattccggcccaggccattaaccttgcccatgtgggcgtttctgcgctaagcgttacggaaaaaatactgataaaaaacagtacggtttgcggattggataaatcggtcattaatccccggcgaaagaaaattgtccacggggcggcaatcggcgtctggagcgtgctcatttgcggcgtcgcctggtggcgaatactgttccaggcgaaccataataaataggcgccgccgacaattttgataagagaaaataccgcttcgcattgcgtaatgagcgtcgccagaccgaaaagccccagcccggaataaaaggcgtctcccgtggcgacgcccaggccggtgatgactcccgcccggcgtcctgatgcgaggctggtttgcaccaccacaaacagattcgcgccgggattaaaaaaggttaacacaaacagactgacggtaagcacaacggcatgaaacggctccatagacaactcttcccatagcctcaagaaataacgttcatcttattaatagtcaaaccagatgattgcgagtgagatcacaaagcaggggcgttttaatccgcgttgttacgccgacagagcgggggctgactggatttttccagcaatctacactacttatttaatcagtccgaacggcctttttgttctgataaagcgatgatggcgtaataataaaacgagggttttgctatgaaaactggctacaaggttatgcttggcgcattagcgtttgtcgtgacaaacgtttatgccgcagaaatcatgaaaaaaacggactttgataaagtcgcctccgaatacacgaaaattggcacgatttccaccaccggggaaatgtcgccgctggacgccagagaagatttaatcaaaaaggcggatgaaaaaggggcggatgtggtggtgctgacgtccgggcagacagaaaataaaattcatggtacggctgatatttataaaaagaaataaaagcattgcatcataaaaatacccgcctgggtttccggcgggtatatttattcctggcaaccggcatccgttttgccggatgacggcctgcagtaaacgtagcgccatcaggcattcaggacgctgtcatttgtcttaattatccgactggtctttggcaccagcttttaaacgacgccacagagtggtgcggctaatccccagataacgcgccgcggcggtcttatcgcccttaaagcgcgccagtacatcctgtaacgcgttcgcatccacggttgaaggcgtcagttctgctgtgttcaccataagctcaggtaataactgccgcataaattgcctgtccagcgttggcgcgggatcgacgcttaaaaaaagcgccaggcgctccatcatattacgcagttcgcgaatattaccgggccagcgccaggccagcaaaagcggctgacactgtgtcaatccatgacgtatcgattcggtaaacggaatttccatcgccgccagcgactgttttaaaaagctttccgccagcggcaaaatatcagcctgccgctcgcgcaaaggaggaagcgtcagacgcagaatactcaggcgataaaagagatcggggcgaaaacgtccttgcattatctcccgatccagatcgcaatgcgtagcgctgatcacccggacatccaccgggatcggctggtgtccgccgacgcgagtgacggctttttcctccagtacgcgcaaaagtcgggtttgtaacggcaagggcatttcgccgatttcatccagaaacagcgtgccgccgtgtgcgatttcaaacagccccgcccggcctcctcgtcgtgaaccggtaaacgcgccctcttcataaccaaacagttccgcttccagcaacgactcggtaatcgcgccgcaattgacggcgacaaagggaggggatggcttattctgacggtgaggctggcggtgaaagaacgtctggtgaatcgcctgcgccgccagctcttttccggtccctgtttccccctgaatcagcactgccgcacgggagcgggcatagagcgtaatcgtctggcggagctgctccatttgcggcgactggccgcgtatatcgcccagttcataccgggtttgtaatcccttgccggatgggtaatccacgcgctggcgccgtgtcagacgggtcatatccagcgcatcatgaaaagcctgacgaacggtcgccgcggaataaataaagatggcggtcattcctgcctcttccgccagatcggtaattaatcccgcgccgacgacggcctcaataccgttggccttaagttcgttaatttgcccgcgcgcgtcctcttcggtgacatagcttcgctgttcaagacggaggtgaaacgttttctgaaaggcaagtaaagccggaatggtctcctgataggtcacgataccgatagacgaggtgagctttcccgctttcgccagcgcctgtaatacatcgaatccgctgggcttgatgaggatcaccggtattgacaggcggctttttaaataggccccattcgaacccgccgcgataatcgcgtcgcagcgctcggtcgccagttttttgcgaatgtaggtcaccgccttttcaaagccgagttgaataggcgtgatggtcgccagatgatcgaattccaggctgatatcccgaaacagttcgaacagacgcgttacggagaccgtccagatcaccggtttatcgctattatcgcgcggagcgctgtgggcagtcgtcatcgcagtagattcatctttaaggggcgattttttgttttaaacgtgtttcataaatgttgcaatgaaacagggtgattcgtttcatgaaacgttagctgacacgtttttttttcccttaatcgcgcttattcataacagaaatgactgtaattacctgtttttaaatctcattgtatttaattttctcgctgcctctttgcctggcatagcctttgctttggtgaatacatcttgaataacaatttactaacatgaggacgagatatgtctttacattcgccggggcaggcatttcgcgccgcgctcgctaaagagaatccattacaaattgtcggcgctatcaatgccaaccatgctctgttggcccaacgggccgggtatcaggctatctatctttctggcggcggcgtagcggcgggctcgctcggactgccggatctggggatttctacgctggatgatgtgttaaccgatatccggcgcatcacggatgtttgcccgctgccgctgttggtggatgcggatattggctttggctcctccgcctttaatgtcgcgcggacggtaaagtccatagccaaagcgggcgccgccgcgctgcatattgaagaccaggttggcgctaagcgctgtggacaccgtccaaacaaagcgatcgtctcgaaagaggagatggtagaccgaattcgggcggcagtggatgcgcgcaccgatccgaactttgtgatcatggcgcgtaccgatgcgctggcggtggaagggctggaggcggctctcgatcgtgcgcaggcttacgtggacgcgggggctgacatgctgttcccggaggcgatcaccgaactgtcgatgtaccgccggttcgccgacgtggcgcaggtgccgatcctcgccaacatcactgagtttggcgcgacgccgctgtttacgaccgacgagttgcgcagcgcacacgtggcgatggcgctctatccgctgtcggcgtttcgcgccatgaaccgcgccgcagaaaaagtctataccgtgctgcgccaggaagggacgcaaaagaacgtgatcgacatcatgcagacccgcaacgagctgtacgaaagcatcaattactaccagttcgaagagaagctggacgcgctgtacaggaataaaaaatcgtagcctgtaggcctgataaggcgaagccgccatcaggcaatgccggatggcactacgtttaacccgcctacggtacggcctacacgcctcaataccctacacattacaataatgacgaggacaatatgacagacacgacgatcctgcaaaacaacacgcatgtcattaagcctaaaaaatcggtcgcgctttccggcgtacctgccggaaataccgctctgtgtaccgtgggaaaaagcggtaacgatctgcactatcgcggttacgacattctcgatctggcggagcactgcgaatttgaagaagtcgcgcatttactgatccacggaaaattaccgacccgcgacgagctgaacgcgtataaaagcaagttaaaagcgctgcgcggattacccgccaatgtccgtaccgttctggaagcgttaccggcggcctcgcacccgatggacgtgatgcgtaccggcgtctccgcgctgggctgcaccctgccggaaaaagagggacataccgtctccggcgcgcgcgatattgccgataagctgttggcctcgctcagctctatccttctttactggtatcactacagccacaacggcgaacgtattcagccggaaaccgacgatgattccatcggcggccatttcctgcatctgctgcacggtgaaaagccaacccaaagctgggaaaaggcgatgcatatttcgctggtgctgtatgccgagcatgagttcaacgcctcgacgtttaccagccgggtgattgccgggactggctcggatgtctactccgcgattatcggcgcgattggcgcgctgcgcggcccgaaacacggcggggcgaatgaggtgtcgctggaaattcaacagcgttatgaaacgccggacgaggcagaggcggatatccgtaaacgcgtggaaaacaaagaggtggtgattggctttggacatccggtttacaccatcgccgacccgcgccatcaggtgatcaaacgggtggcgaaacagctttcagaagaaggcggctcgctgaagatgtaccacatcgccgaccgtctggaaacggtgatgtgggagaccaaaaagatgttcccgaatctcgactggttttcggcggtctcctacaacatgatgggcgtccctaccgaaatgttcaccccgctgtttgtcatcgcccgcgttaccggctgggcggcgcacattattgaacagcgtcaggacaacaaaattattcgcccctctgccaactataccgggccggaagatcgtccgtttgtctcgatagacgatcgttgctaactcactcttattaaaaataaaacgcaggaaacgtaccctatgtctacccaagaactgaacatccgcccagactttgaccgtgaaatcgttgatatcgttgattacgttatgaattacgagatcacctcaaaggtggcgtacgacaccgcgcattattgcctgctcgacacgctcggttgtggtctggaagcgctggaatacccggcctgtaaaaaattgcttgggccaatcgtgccaggcacggtggtgcccaacggcgcacgcgtgccgggcacccagttccagctcgatccggtacaggcagcttttaacattggcgcgatgatccgctggcttgattttaacgatacctggcttgccgccgagtggggccatccttctgataacctcggcggtattctggcgacggctgactggctgtcacgcaacgccgtcgccgccggcaaagcgccgctgaccatgaaacaggtattgagcgggatgatcaaagcccatgaaattcagggctgcatcgcgctggaaaacgccttcaaccgtgtcggacttgaccatgtgttgctggtgaaagtggcctcgactgcggtggtcgctgaaatgctggggctgacgcgcgatgagatcctcaacgcggtatcgctggcgtgggtggatgggcagtcgctgcgtacctatcgtcatgcgccgaataccggtacgcgcaaatcctgggcggcgggcgatgcgacttcgcgcgcggtacgtctggcgctgatggcgaaaaccggcgagatgggctatccctcggcgctcaccgccaaaacctggggcttctacgacgtttcattcaaaggtgaaacgttccgtttccagcgtccttacggctcctacgtgatggaaaacgtgctattcaaaatttctttcccggcagaattccactcgcaaaccgccgtcgaagcggcgatgacgctgtatgagcagatgcaggccgcgggtaaaacggcagcggatatcgagaaagtgaccatccgcacccacgaagcctgtctccgcattatcgataaaaaaggcccgctcaataacccggcggaccgcgatcactgtatccagtatatggtcgccgtgccgctgctgttcggacggttaaccgcggcggattatgaagacgaggtggcgcaggacaagcgtattgacgccctgcgcgagaagatcgtgtgttatgaggacccggcttttaccgccgactatcacgacccggaaaaacgagctatcggcaatgcgatcaccgtggagtttactgatggatcacgctttggcgaggttgtcgtggagtatccgattggtcatgcgcgtcgccgcgccgacggtattccgaagcttatcgaaaaatttaaaattaacctggcgcgtcagttcccgactcgccagcagcaacgcattctggatgtctccctggacagagcccgcctggagcagatgccggttaacgaatacctcgatttatatgtcatctgagccagccagcagtaaggcgtaagttcaacaggagagcgtgatgtcttttagcgaattttatcagcgttccattaacgaaccggaggcgttctgggccgagcaggcccggcgtatcgactggcgacagccgtttacgcagacgctggatcatagccgtccaccgtttgcccgctggttttgcggcggcaccactaacttatgtcataacgccgtcgaccgctggcgggataaacagccggaggcgctggcgctgattgccgtctcatcagagaccgatgaagagcgcacatttaccttcagccagttgcatgatgaagtcaacattgtggccgccatgttgctgtcgctgggcgtgcagcgtggcgatcgcgtattggtctatatgccgatgattgccgaagcgcagataaccctgctggcctgcgcgcgcattggcgcgatccattcggtggtctttggcggttttgcctcgcacagcgtggcggcgcgcattgacgatgccagaccggcgctgattgtgtcggcggatgccggagcgcggggcggtaaaatcctgccgtataaaaagctgctcgatgacgctattgcgcaggcgcagcatcagccgaaacacgttctgctggtggacagagggctggcgaaaatggcatgggtggatgggcgcgatctggattttgccacgttgcgccagcagcatctcggcgcgagcgtgccggtggcgtggctggaatccaacgaaacctcgtgcattctttacacctccggcactaccggcaaaccgaaaggcgtccagcgcgacgtcggcggttatgcggtggcgctggcaacctcgatggacaccatttttggcggcaaggcgggcggcgtattcttttgcgcatcggatatcggctgggtcgtcggccactcctatatcgtttacgcgccgttgctggcaggcatggcgactattgtttacgaaggactgccgacgtacccggactgcggggtctggtggaaaattgtcgagaaataccaggttaaccggatgttttccgccccgaccgcgattcgcgtgctgaaaaaattcccgacggcgcaaatccgcaatcacgatctctcctcgctggaggcgctttatctggccggtgagccgctggacgagccgacggccagttgggtaacggagacgctgggcgtaccggtcatcgacaattattggcagacggagtccggctggccgatcatggcgctggcccgcgcgctggacgacaggccgtcgcgtctgggaagtcccggcgtgccgatgtacggttataacgtccagctactcaatgaagtcaccggcgaaccttgcggcataaatgaaaaggggatgctggtgatcgaagggccgctgccgccgggctgtattcagactatttggggcgacgatgcgcgttttgtgaagacttactggtcgctgtttaaccgtcaggtttatgccactttcgactggggaatccgcgacgccgaggggtattactttattctgggccgtaccgatgatgtgattaatattgcgggtcatcggctggggacgcgagaaatagaagaaagtatctccagctacccgaacgtagcggaagtggcggtagtggggataaaagacgctctgaaagggcaggtagcggtggcgtttgtcattccgaagcagagcgatacgctggcggatcgcgaggcggcgcgcgacgaggaaaacgcgattatggcgctggtggacaaccagatcggtcactttggtcgtccggcgcatgtctggtttgtttcgcagctccccaaaacgcgttccggaaagatgcttcgccgcacgatccaggcgatctgcgaaggccgcgatccgggcgatctgacaaccattgacgatcccgcgtcgttgcagcaaattcgccaggcgatcgaagaatagccgtaagccggataagccgcgttcggcaacgggttagactcagcgactgaatagtggggtgtaaagtcgggaaagggcggcagcgcgccgccctgtaacagaattaacgcagaatatttttctcagccagatccagtgcgaagtagctgaaaatcaaatcggcgccggcgcgtttaatcgagcccagactttccagcacgaccttttcttcatcgatggcgccagccatagcagcaaatttaatcatggcgtattcaccgctcacctggtaagcgccaagcggcaactctgtgcgttcgcggatttcacgcagcacgtccagatacgcgccggccggtttcaccatcaagcaatccgcgccctgggcttcgtcgagcagtgattcgcgaatcgcttcacggcggttcatcggattcatttgatacgtcttgcggtcgccttttaacgcggtacccgctgcttcacggaaagggccgtagaaagaagaggcgaacttggtggagtaggacattattgccgtatcggtaaaaccggcggcatccagcgcctggcggatagcctggacttgtccatccatggccgcggagggcgcaataaaatctgctccagccgccgccgcgataacggcctgcttgccgaggttggccagcgtcgcatcgttatccacaccgtgttcgcacaacacgccgcagtggccgtgcgaggtgtattcgcagaagcaggtgtcggacatgacgatcatctccggcacggtttgcttacagatgcgggacattcttgccaccagaccgtcttctttccaggtatcgctgccggtgtcatcagtatggtgagaaatgccgaaggtcataacggaacgaatgccagcatttgcgatacgttcaatctctcgcgccagctgcttttccgggatacgcattacgccgggcatggcatcaatagctttgtaatcgtcgagttcttcttcaacaaagatcggcaacaccaggtcgttcaggctaagtgttgtctcttcaaacatagcgcgcagcgcagcggatttgcgcaggcggcgagggcgatggataaggtctgtcatggtctgcctgatgtttgtggaatcgaaggcccagtatacctgaatctgcaggcagatgttttacgaaaacggtccttaacgtagcaggcgcagccccggcggcggcggaacatggcgcttcttttatataccgaagattaatacctcaggcactatatcattttaaataagaattagttttacgttgtttttagttttatttcatcgtcatttaagtaaatgtgggttttaacattattcatgtttattttgtttttctttaatctatatttatcttatatgtattttgtttttttattttcttgtaaggtcatgaaaaagaatgcttttcaattataaaacttccttttattacgtctttttaattcatgtccgaatccggactgaggataaagaataattgaaccttttagcaatgacgccgcataatccttcttgctaaacatctgtatgtttttatgcattgataattgatggatcaactatattacgtccctgaggagggatgacaaatgcactcctggaaaaagaaacttgtagtctcacaattagcattggcttgcactctggcaatcacttctcaggcgaatgctactacttacgatacctggacttattacgacaatcctaccaccgcgcttgattggaataatatggatgccgcaggcactgttgatggtaactatgtaaactatagcggtttcgtttactacaacaatgccaatggtgatttcgatcagacgttcaacggtgacactgttaacggtacgatttctacctattatctgaaccatgattataatgacgcaaccagtaatgagctgaatattagtaattcagttattcatggctcgattacttccatgctgccgattggttattacgatcgttttgatacgttggatcacgatgggtattctgaatattatcggttcaacaacggtactgatactgttgacggaaactggtatgacggtgatgtgttcacgctgaacatcgctaattccaccattgatgatgattatgaagcgttttacttcactgattcctataaggatggtgatgtaactaagtacacaaatgaaacattcgatgtcagcgaaggcgtggcggtgaatcttgatgtagaaagcaacatcaatatttccaacaattcccgtgttgcaggtattgccttgtctcagggaaatacttacaacaacacttacacgacggaatcccataactgggataacaatattaatgtatttgactctactgtaacttccggttcagattatatcctggatagtgcttatactactgacactggtacttttggcacaggtcactttggcaattccgatgagccgagcgattatactggtgctggcgacgttgcattatctttcactgatgacaatggtgcttcagactatgcaatgaagaacaatgtgtacttcagtaattctacgctgatgggtgatgtcaaatttaccagtaactggaacgccaatttcgatgctgatggtgatgatactaacggtgatggtgttcctgataccaaccatggctgggctgatgacggcctcaacgtcgacgaactgaaccttacacttgataatggcagtaagtgggttggtcaggcgacttatactgttgatacaacgtcccgtatgtatgatgttgaaacgaacagccttactccaggcgcaacattggaagataatgcctggaatcgtatcgttggtaatgaagttttccagagcggcgtgtttaacgtgacgctgaacaatggttctgaatgggacaccgttggggactcgactgttgatacgctggctgtaaacaatggttctcaggttaatgtttctaattctgatttaacatcagacaccattgatttgactaatggttcttcactgaacattggtgaaggtggttatgttgacaccgatcacctgacaattgactcctatagtactgttggtttgaccgaatctactggctggagtacttactcaaacctgtatgctaataccatcaccgtaactaacggtggtgtgttggatgtgaatgttggtcagtttgataccgaagtattcagcactgataaactggaactgaccagcggcaatactgctgatcacaacggtaatgttgtttctggtgtgttcaatatccatagcagcgattatgttctgaacgctgacctggtgaacgaccgtacctgggataccactcaggctaactatggttacggtactatcgcaatgaactctgacggtcacctgaccatcaacggtaatggcgatatcaacaacggcgacgaactggataacagctctgttgacaacgttgtagcggctaccggtaactataaagttcgcatcgacaacgctactggtgccggttctgttgcggattacaaaggcaacgagctgatttatgtcaatgacgtaaacaccgacgcaaccttctctgcagcaaacaaagctgacctgggtgcttacacctatcaggctaagcaggaaggcaacactgtcgtgctggaacagatggaactgaccgactacgctaacatggcgctgagcattccttctgcgaacaccaatatctggaacctggaacaagacaccgttggtactcgtctgaccaacgctcgtcatggcctggcggataacggcggcgcatgggtaagctacttcggcggtaacttcaacggcgacaacggcaccattaactacgatcaggatgttaatggcatcatggtcggtgttgataccaaagttgacggtaacaacgctaagtggatcgttggtgcggcagcaggtttcgcgaaaggcgatctgagcgatcgtaccggtcaggtggatcaggacagccagtctgcctacatctactcttccgctcgtttcgcaaacaacatctttgttgacggtaacttgagctactctcacttcaacaacgatttgtctgctaacatgagcgacggtacttacgttgacggcaacacatcttctgacgcctggggcttcggcttgaaactgggttatgatctgaagctgggtgatgcaggctacgtaacgccttacggcagcgtatccggtctgttccagtctggcgacgactaccagctgagcaatgacatgaaagttgacggtcagtcttacgacagcatgcgttatgaactcggtgtagatgcaggttataccttcacttacagcgaagatcaggcgctgaccccgtacttcaaactggcttacgtttacgacgactccaacaacgatgctgacgtaaacggcgactctatcgacaacggcgtagaaggttctgcggtacgtgttggtctgggtactcagttcagcttcacgaagaacttcagcgcctacaccgatgctaactacctcggcggcggtgatgttgatcaagactggtctgcaaacgttggtgttaaatatacctggtaatcattttctctcaggagaaataaaggtaatttaaactgaaaaatgcccgtcaaggacttgacgggcattattgcaaggaatgcatatgttatctttaagcaagccactacaggaattctacagactcgataaatgcctttctaagcatggtacgcgtttcgagtttgttaacgataaagagattatctgttcacctgatgaaagtaatacccatacctttgttattttagagggggttgtttcgttagttcggggtgataaagttcttattggtattgtgcaggccccttttatttttggcttagccgatggcgtggcgaaaaaagaggcacaatataaattaattgcggagagcggttgcatcggttatcgcctctcatcatcacaaactctcgccatcattgagcagaaccaactgtggcgtgaagccttctgttggatagtatggaaaagtcaggtactggaacttcgtgacaagcagctcattggtaataattcttacgaccaaattcgtgcgacgttaatgacaatgattgagtgggatgaagaacttcgctcacgtattggtgttatgaattatattcatcaacgaacgcgcgtatcgcgatcggtggtggcggaagttctcgcggccctgcgtaagggtaattacattgaaatgaataaaggcaaactgatcagtattaaccgtttgccctccgaatattaacaaaaatgttgcgcctcgtctgatatagcgcgaggcgcgacgactcaggatgcaggaatagcaatcggtttattgccgcttagctcagtaaccaaatcgttaatcccgtcgctcatattggtaaaacgagtgaggggggaacgggttaccaccacaaaagcgccaatattatattgcgggatcatcgccatataggtaataaaaccgccgccgcctcctgttttctggataatgccaggacgtccgtcttttggcgccatatagacccaacccagaccgagcgcgtcggctttacccggtacgtccatcccgatgattttctttaactgtatgcgctgataaatcaacgtttgcatacgatcggcctgttggctacggtgatagaaatctgacgacagatactgttgcatccagcgcatcatatctcctggcgtagaatagaccccaccgctgccaatggctgccagcgtattattacaggggcttgcgcctttttctgccaccatcagacgcttacactgatcgggagaaggggtaaacgtggtgtctttcattcccagcgggcgggtaatcttttcttcaaacagttgcgtataaggtttgccggaggcggtcgccagcgcgtcggctaacaggtcgaacgccagattggaataggccgcctgtgaaccgggcgcgacttttaacgttgctgtggagagccagttccagcgttgttcgcgggttggccagacaaataccggacgatgcgccgcgccgccgggctgttctcgcggaagcgcgctggtgtgggtcgctaagttgaccaacgtaatcggcgtgccttgatacgtcgggacacgcgcgccgggaggcgcatatttgctgagaggatcgtttaattttaccgttccctgatcgagcaattttaccaacatttcactggtcatgagcttggtgagagaagcgatacgaatgaccgaatcaagctgtggacgaacattattgcccggtctggtgtcaccgaaactacgaaacacgcgttgattgccgtcgatcaccaccagcgccatgcccgtggcgccgctaccataaaagatatgctcggcataacgatcaacgatatcagaggcaaaaaccggatcggcaatcggctgagccgcctggacagaagtaagtgatgccgcaaacagcatggcagtaaaaagcagactacgtttcaacggtgatgtccataagtgaaataacggtggttatgcgtatttatactacccggcggcacattgcaaaacgttaaagagaaaaaagtgggtgaaaaaacgtaacggcgggttttcgtgatggagaatgtttacttttgtgatagagcgcttgtgataacctgatagcgtcagcgtgcctgctgtgtatgaaactcgtcgaaacaattctgttgagcagaaatgcgaactaagcgtcacaacgtaggtcacaatgcctggtttagccctttcatttgcgtgggcatggcgtgctattgccgccgtcacagcagccgtaataaagataagaagttagcaggagagcatgatgtttaaatcttttttcccaaagccagggccgtttttcatgtcggcgtttgtttgggcgctgatcgccgtcattttctggcaggcgggaggaggagattgggtggcgcgacttgtaggggcatccgatgaagtgcctatcagcgcagcgcgcttctggtcgctggactatctgattttttatgcttattacctgatttgcgtgggattatttgcaacgttctggttcatctatagcccgcaccgctggcagtactggtcgatacttggcacctcgctcattatttttgtcacctggtttttggtggaggttggcgtcgcggttaacgcctggtacgcgccgttctatgatttgattcaaacggcgctcagctcgccgcacaaggtcactcttggtcaattttatcatgaagtgggggtgtttctcggtattgcgcttatcgccgtggtgatcggtgtgctgaacaacttctttgtcagccactatgtatttcgctggcgtaccgcaatgaatgagcactatatggcgcactggcagtacctacgccatatcgaaggggccgcccagcgtgtgcaggaagataccatgcgttttgcctctacactggagaatatgggcgtgagttttatcaatgccatcatgacgctcatcgcctttctgccggtgttagtcaccctgtcagcgcatgtgccgaatttacccatcgtagggcatatcccttacggcctggtcattgccgccatagtctggtcattaatggggacgggcctgctggcggtcgtcgggatcaaattgccagggctggaatttaaaaatcagcgagtggaagccgcttatcgtaaggagctggtctacggtgaagatgacgccagccgcgccacgccgcccaccgtccgtgaactgtttagcgcggtgcgccataactactttcgtctctactttcactatatgtatttcaacatcgcgcgcattctctatttgcaggtcgataacgttttcggtttgttcctgctgtttccttccattgttgccggtacgattacgctggggctgatgacgcaaatcaccaacgtgtttggccaggtgcgcggttcgttccagtatttgattaactcctggacgacgctggtggagctgatgtctatttataaacgtttacgtagctttgaacgccagttggatggtcagccagttcaggaagtgacccactcttttagctaacagaaggaaacgttatgtcggcggcgtcccgtctttatcctctgccttttctggcggttgccatattggctggctgtagtagtcaatccgggcagccggtgagcaagggcgagaagcctgtcgacgtggcaagcgtagtacgtcagaaaatgccagccagtgtcaaagacagagaggcctgggcgaaagatatcgcgacaacgtttaagagccaggggctggcgccgacggtagaaaatatctgttcggtgctggctgtcgcccagcaggagtccggttatcaggcggatcctgtcgtgccggggctaagtaaaatcgcctggcaggagattgatcgccgcgctgaacgactacacatcccgctgtttctggtgcacaccgcgctgaaaattaactcccccaacggcaagagctatagcgaacgcctggacacggtaaaaaccgaaaaacagcttagcgctatttttgacgattttatcaatatggtccctatggggcagacgctatttggctcatataacccggtgcatacgggcggcccgatgcaggtcagcattgcctttgccgaacagcacgcgaaaggctatccgtggaagatgacgggtacggtacgtcaggaggtctttacgcgccgtggcgggttgtggtttggaacctaccatttgctgaattacccggcgaactacagcgcgcctgttttccgcttcgccgacttcaacgcgggatggtacgccagccgtaacgctgcgttccagaatgccgtcagtaaagccagtggggtaaaactggcgctggatggcgatctgattcgttataacagcaaggaaccgggcaaaacagagttagcggtacgcaaactggcagggcagttgggaatgagtgagcgtgaaattcgcagccaactggagaaaggcgatagcctggcgtttgaaaaaacggcgctctacaagaaagtctataaactggccgaggccaaaacgggcaagacgcttgcgcgggaaatgttgcccggtattcaactggaaagtccgaagatcacacgcaagctgacgaccgcctggtttgctaaacgagttgatgagcggcgggcgcggtgtatggggcgataaatttcgcgctgggatactttctccagcgcgctaaggtttattggtgacggtgacgccagcgtaaaaacgcggcgataacggcgaaaatgaggcagcccgtgaggaagggcaccaggccaaaaatcgtcccgacgcccagcccaatctctacccgcggtcgacctgtatcctgtacctgcatcagatgctcatagatgcccggcgcatgaaccagcaggtttaagagttgcgctccggcccagaagcaaaacagtacaaatatggcgtaagcaatatttccgggcgtagaggaggtttctcgatgcttcccgctgaacagcgattttgagagagtgaaatcagccataaagacctccaggatgatcggctacgatctggcgttatgccatcggcttactgtgaagtctgacaggtcattgtgtttgtcaatatcagaatcatggtaatttcacatacgaaatgtatccatcgcgtaaatttttgttagttgtcacaaaacgatcacttttatcaaaatcaattaacatttaagaaattccgtatcccccacagactcgctcgccagaagtatgcaaaaatacgtttttgttactgttaatacgtcggagtcgttatgcgtttgcctgtaaaaattcgtcgtgactggcactactatgccttctctattggccttatctttattttgaatggcgtcgtaggattgctgggttttgaggctaaaggatggcaaacctatggcgttgggctggtaacatggattattagcttctggctggcggggttcattattcgccggcgcgaagaggatgaggtaaaagacgcccgataaacgttgcgctatcgggcgtgcgctattacatcgtggtttttaaggcgttattcgccgtatggcgttccagcgccagctcaatcagacggctgatcaaatcggtatagcccagtccgctcgcctgccagagttttggatacatactgatattggtaaaacctggcagcgtattgatctcgttaatcacgacctcattgtctgccgttaagaagacatcgacacgcgccatacccgcgcatcccagcgtctgataagcctggatcgcgatcgcgcggatcttgtcattcacctcggaagggatctgcgcaggcacgacaacttgtgcgccattatcatcaatatacttagtatcgtaggcgtaaaattcgctgttcagtacgatttcgccgcaggtactggcctgtgggttatcgttacctaatacggcgcattcgatctcgcgccctttgatcccttgctccaccaccactttatgatcgaattcgaaagccagcgcgaccgcctgctgatattgcgcttcgttagcgactttactgacgccgaccgaagagccctgattggcgggcttaacgaacagcggcagtcccagacgggattcaacctcggcaaaactaaacgcgtgacgattcgttcgggtgagtgtaataaacggggcgatattcagtccggcatcgcgtagcagtcgtttggcgacgtctttatccatgcaggctgcggagctcagcacgtctgaaccgacaaacggtaagtttgcgacgcgcagcatcccctgcaatgagccgtcttcgcccagcgtaccgtggacgataggaaaaataacatctaccgtcggtagcggctgcccgttctgagcgttaatcaattggtgttggtgtttgccaggcacctgggccagactgattgccgaaggacgtagcgcgatatgtgccggatcgtctgcattctgcaaataattttccgcatcgttaacatgccattgtcccgccttatctatccctaacagcaccacgtcgaagcgggttttatcgatcgcatcaacgatatttttcgctgattgcaaagacacttcatgttccgccgacttaccgccaaatactattcctacccgcaatttcgccatcttaaaaacccattccatcgaatgcaaagcgtatacattaccacgacaaaacgcgggtttcgcgggcttctgccataatgtttatgggatgtgagaacggaggccgcgtgagaggtaagggttttctgattattgtgctgttgggcggcattggcgggctgggatatcgttatcttccctcttattataatccttttgctccgctacaacttgccgatccgccaggctggatcactaccttcaaactacagcgcctgacgccgtcgcagtgccgggagcttttgacggcggccaatcaacagggattaatttcatcacaacctgttgcggatagcgctggtgaatgtcccttatcccatgttgtgcgcgtcagagattttggccaggtaaaactgagcagcagttttttagcctcctgcccgttggcgctgcgctccgcgctgtttgtcgaacagcaggcaaaacctttaacagaaacgtggatgaagcgccgcctgacccgtatcgaacatctgggcagctatgcctgccgtaatatttatcaccgcccggatgcgcgtcgcagtgaacatgccagcgcagaagcgctggatgtcagcgggtttcagctatcggatggccgaaaaatcactgtcctgcgcggctgggggcgtcaggagacggggccctggttacgcgctatgttaaacgccagttgccattattatggcaatgggctcgggcctgactataacgctgcgcatgctaaccattttcatcttggaatgcggggctacggcgtgtgtcgttaaagcataaacgtctgccttgcgcggctatataatgtgacatgtttcacaaaaatgatgaacggggagacaaaatagcaaagtgtgacgtatcgcacctctggaaccaccaggaaaaagagaacttgctaagctaacgcgtattttcagctacttaccgttacgagtcttatggaatcctggaaagttaatctaatttccgtttggtttggatgtttttttaccgggctggcaatcagccaaatcctgccattcttacccctttatatttcccagcttggcgtctcttcccatgaagcgttatcaatgtggtccgggttaacgtttagcatcacgtttcttatttccgccattgtgtcgccgatgtggggcagtctcgccgatcgtaaagggcgtaaactgatgctattgcgcgcgtcgctcgggatggcgatagctattctactgcaggcatttgcgacccatgtctggcaacttttcctgctgcgcggaatcatggggttaacgtcaggctatatccccaatgccatggcgctggtagcctctcaggtaccacgcgaacgtagcggctgggcgctcagtacgctttctaccgcgcagatcagcggcgttatcggcgggccgttaatgggcggctttgtcgcggatcatatcgggctgcgggcggtatttctgattaccgccatgctgttggtggtgagctttctggtcacgctatttttaattaaagaaggcgtgcgtccggtcatcaagaaaagcgaacgcctgagcggtaaagccgtttttgcgtcgttaccttatcctgcgctggtgatcagtttgttttttaccacgatggtcattcaactctgtaatggttccatcagtccaatcctggcgctgtttatcaaatcaatgatgccggacagtaataacatcgcctttcttagcgggttaattgcctcggtgcccggtatctctgcgcttatctccgcgcctcgcctgggaaaacttggcgacagaatcggcacggaaagaattctgatggccacgcttatctgcgcagtgctgcttttcttcgcgatgtcctgggtcaccacgccgttccagctggggctgttacgtttcttgttaggctttgccgatggcgcgatgttacccgccgtacaaacgttattggtgaaatactccagcgatcaaattaccggacgtatttttggctacaaccagtcatttatgtacctgggcaacgtggttgggccgttgatgggcgcgacggtatcggcgatggccggtttccgctgggtttttatcgctacggcggcgatcgtgttgatcaatatcgggcaactgaccctggcgttacgtcgtcggcgtaacgcgcaaaaagcgaaaggccaatagcggtgcatcgtaacggcgcttctgccgttacgatatggtttaaattaaaagatatattctttatccgtgaagtttttctatagatggcataaccttaaattatgatatagcgtgattattgttttttgatggtttattatcgtctcgttttcggtctgagaaacgtttcgctgcggcgacagtgataattatttgtgtaaagttcttcctgtatcataaaaatagtactttcagcctctaggcagtggttcttcatagtgataacgtcaccctggaactaataaggaaatatggtcatgaaaaatctcatagcagagttgttgcttaagctagcccaaaaagaagaagagtcgaaagaactggttgctcaggtagaagcgttagagattatcgtcacagcaatgttacgtaacatggcgcaaaacgagcaggagatgttgatacgtcaggtagagggggcacttgaaggcgtaaagccggatgccagcgttcctgatcacgatacggaattgctgcgccaatatgtaaaaaagttgctgagacacccccggcactaatcgtatttaaaacaacacagttgttataacgttacttttatgaaataacatagccgcttcgtttttattttcttctgggtaatacagagcaaaataaaaacgaagcggctatggtaataacagtgtaacgttatgcgctgttcttctgcatcctgccagtgtaactgtggataatcgaattgcacattagcctacggtttgtcaatcaataaaacatctattgctaacggtaagtaatacttttacagccgggtggtatttttgccagtaacagccagacttatataaagtccctgggatatttcccaaagggacaacgtgtaatgtgtacactgacaaaaggatggtgctatgaaaataacattactggtgactttactttttggcctagtctttttaaccgccgtcggcgcaaccgagaaaccgttaacgccgcaacagcagcgcatgacgacctgtaatcagcaggcgacagcgcaagcgttgaaaggcgatgcgcgtaaaacctaccttagcgactgcctgaaaaacagtcagtcagcccctggcgagaaaagcctgacgccgcaacagcagaaaatgcgtgaatgcaatgttcaggcgacggaacaatcactgaaaggcgatgaccgtagcaagtttatgagcgcctgcctgaaaaaagcggcgtagtgctatcgggtgagtcctgaaaaacactcacccgaaatttcatacttcctccatgcgctctgtttctataatttgggaaaattgtttctaaatgttcccaaaaataatgaatgatgaaaatttttaccgaaaagcggttgaacaggcggtagcgccgcctgaccctcctgatgatcgtcagcgctccgggttgcgcttcgcccggcgcatcaggctaccgcgtgcggtggggttaggggggatgtttttaccggtggccgccgtgttagtgacgcaacctgtctttggcggctggtggctattgctggtcggctggtcttttgtctggccgcatctggcatggcagtgggcggcgaaagcccttgatccgctacgccaggaaatttacaacctgaaagtggatgcgatcctctccggcatgtggatcgcgctgatgggcgtcaatatgttgcctgccgccgcgctgtttatgatgatgagcatgaatctgatgggcgctggcgggcggcggctattcactgtcggaatgggccttttgctggcgtcatgtctggtgacgttgcagcttgccgggctacccgtcgcgatgcgaagctcgtcgctggaagtcacgctctctttgcccgtcattatgttgtatccgcttctgttcgcctgggtaagttaccaaacggccattaaattagcggaacataagcgacgcttgcaggcgatgagctcgcgggatggcatgaccggcgtctataaccgacgccactgggaaattttattacgtaatgaattcgatcacagccgacgccaccatcgggaggcgacattgttgattatcgatatcgatcattttaagagcattaacgacacctggggacatgatgttggggatgaggctattatcgccctgacgcgtcaattacagataacgctacgcgggagtgatattatcgggcgctttggcggcgacgaatttgcggtgattatgtgcggaacgccggcagacagcgcgattaccgccatgtcgcgagtgcatgaacggctaaataccttacgcttgccgggcgcgccgcaggtcatgttacgtatcagcgtgggcgtggcgccgttaacgccacaaatcggtcattatcgggaatggctaaagtctgcggatatggcgctttacaaagcaaagaatgccggacgtaaccgcaccgaagtggcggcatgacgtccagccgggcttcaggatttactgagcgcctctgatttttccatacacttcgtcatcgcttctattaccgcagcgcggaagccacgttcttccagaacgcgtacggcttcaatcgtcgttccgccaggcgagcacaccatatctttcagttcgccgggatgctttccggtttcgagtaccattttcgccgaccccatgacggcctgcgcggcgaatttataagcctgagcgcgaggcataccgcccagaacggcagcgtccgccatcgcctcgataaacataaagacataggccggcgaagatccgctcacgccaaccaccggatggatcatcggctcagcaatcacttccgccccgccaaagcagcggaaaatattcagcacatcagccgtatcttccggtgtgaccagcgcgttgggcgtgacggaggtcattcctgcgttgaccagcgacggcgtattcggcatagcgcgaatgattttacggtcgtgtcccagcgcgcgcgcaagctgatcaagcgttacgcctgcggcgatagagaccaccagcgagtctttgttcaggctggaggagatttcactgagcactttcaccataatgcccggttttaccgcgccgaaaacgatatccgcgacctgagcgacctcctgcgcgctttgcgccgcattaatgccgtactgatcatgcagggcggcgactttatcgggggagggggtatagacccagatctggccgggaagtacctgaccgctggcaatcagtccgccaagaatagccttgcccatattaccgcagccaataaaaccgattttcttctccatctcgtcactccctatgtttgtgtgttatggggaatggttagcttaacgcggattgaaaacgggcagaaggagaaacagcactttgatgaaagacaaaagcgcgagacaataaaagattgtataccgtacgggagacattatgaccatctgggtggatgcggatgcgtgtccgaatgtcattaaagaaattttgtaccgcgccgccgagcggatgcagttgccgcttattctggttgccaatcaggccttgcgcgtgccgccttcgcgttttatccgcacgcttcgcgtggccgccgggtttgacgtggcggataacgaaatcgtgcgtcaatgcgaagcgggcgatctggtgattaccgcggatattccgctggcggctgaagtgctggaaaaaggcgctgcggctcttaatccccggggagaacgctatagcgacgccacgattcgcgaacgtctgacgatgcgtgactttatggacacgctacgcgccagcggcgtacaaacgggggggccaaacactctctcgccgcgcgatcgtcagcattttgccgccgagctggataagtggtggctggaaagccagcgtaaaaaataaatcatgtaatgaaaaatttacagtttattcatttctgattcttgctatagtactaatattgtgactttagtacctttgtgtaaattattatttacatttatgcgttgtactagttagatgatatgattataacattgctgatatcaaatcctgcgtatgcgcagttcctgggggaacgcctgctatgatgcaacctctttatcttgttggcccgcggggctgtgggaaaaccaccatcggtatggcgctggcgcaggcaaccggttttcggtttgcagataccgaccgctggctgcaatcgcacgtgcagatgagcgtcgctgatatcgttgaaaaagaaggctggggagggttccgcgcccgggaaaccgcggccctggaggcggtaagcgcgccttcgactgtcgtggcgacgggaggcggtattattctcacggagtataaccgacgttatatgcaccgtgttggcgtagtgatttatctgtgcgcgccggtatccacgctggttaaccggcttgaggctgaacctgaagcggatctgcgcccgaccctcaccggcaagccgttgagcgaagaggttcgggaagtgcttgagcagcgtgacgcgttgtatcgcgaaacggcgcattacattattgacgcgacgaaagcgccggcccaggtcgtttctgaaattattgcggcgctgccgccgtcgacgcaacggttacagggagatgtctatacttaacgctcacccagaataaaggaaacgctatgccaaccagaccaccttatccgcgggaagcttatatcgtcaccattgaaaaaggcacgccgggccagacggtgacgtggtatcagctacgggctgaccatccgaaacctgattcgctcatcagcgagcatccgaccgcagaagaagcgatggatgcgaaaaatcgttacgaagatccggataaatcatagacgcatgaaccactcggaagggattctgagtacccctaaattgtatctccatcacattcttgaaacatttatactggcaactaaaaccgtaaattaagcgataacaatacaatattggagttatttggaatctttacacaatacgttgctcatctgctgctacgctttctgagatttgtagggcaggtagcgcggtgagcgtgtgaatatttgcccgggaattacgacgaagtaataaggtggaataaaaatgagtgcgtcgttggcaatcctcacaatcggcgttgtgccaatgagcgaagtgttaccgcttctgacggaatacatcgacgaacaacacatcacccatcatagcctgctgggaaaaatgagccgggaagacgttatggcggattacgctgtagagcctggcgacgatccgcttttgacgttgctgaatgataaccagatagcccatgtttcccgccagaaagtggagcgagatttacagagcgttgtcgaggtgctggataatcagggttacgatgtcattatactgatgagcaccgcggcgattaaaagtatggcagcccgtaattctattttgcttgaaccgctgcgtattattccaccgcttgtcgcctctattgtggatggacatcaggtgggcgtgattgtgcctgttgcagaacttctggcggcccaggagaaaaaatggcaggtattgcaaatgccgccggtgtattcgctggcgaatccggttcacggttctgagcaacagttaattgatgccggacaggcgctactggatcaaggcgcggacgtcattatgctggattgtctgggttttcatcagcgtcatcgggatattttacagcaggcgctggatgtgccggttttactctctaacgttttgattgcgcggttagcttcagaactgcttgtctaattttacgtgacaggccgaacgtcaggactctatattgggtgttaatttaataatgagacggggcctgattatgctacaaagcaatgaatacttttccgggaaagttaagtctattggatttaccagcagtagcaccggccgggccagcgttggtgtgatggcggaaggggagtatacatttggcaccgccgaacccgaagagatgacggttgtgagcggcgcgttgaaggtactgttgccgggaactgtcgaatggaaagtgtatacagccggtgaggtgtttaacgtgcctggccacagcgagtttcatctccaggttgctgagcccgcctcgtatctgtgccgctatttgtaacggtgagtcccctctccggcggagaggggccctctggttagcgctgcgcttcgccgcctaatccttccaccaggctttgaatcagcgccgccagctcgccggtcatcaggataaagtccgcgtcaaaacgttgggcaaaatcttcccggtcgatatcttcgttctggtcgcgcagctcatcgcagaatttcagacgcttaatggagccgtcatcgcacatgacgaattgaatgcgctgctgccagtcgagcgccagcttcgtgaccactttacccgcttcaatatgaacggcgatctcgtcgctgaccagatcctgctttttcgcgcggatcacgccgccatcttccagcatcgctttcaattcggcttcgtccagcaactggaaaccctgagcgaccgtaccggagcgcacccactcggtgagcgtcagctcaatcggattttccagcgccagcgggacgaccggcagcgagccaagacttttacgcagtagcgccaaagtatcttccgcttttttcgcgctggcgcagtcaaccataatcaggccgttaacggtatcaatccacatcattgtctgactgaagcggctaaacgcgcgcggcagcaacgaatgcaacacttcatccttcagggaatctttttccgtcttcttcagcttgcgtccctgatcggcttccagtttctggattttcgcctccagtgcctgtttgatcactggcgatggcaggattttctcttctttgcgcgcgcaaataataatttggccattggcggtgtgcgttaacgcatcgctgtgagagcccatcggcggaacccagcccattttggccatatcctggctaccgcatggggtaaacgtcattgaggcgagctgtttctccatctcttcggcgcgtaatgtaatatcgcggctaagacggtaaaccattaaatttttgaaccacagcatgataatttccacggccttgtcgttaaatccaggcggtatagtaacgaattgtcggcaggcttgcattgccaatcagaacggtgaattctaccctgttgatattcccaaaaaatgaggagcggtatgtgcgtattggtatcgatttaggcggcacaaaaacggaagtcattgcgcttgatgatgcaggagagcagcggtttcgccatcgtctgcctacgccgcgggaggattatcagcaaacgatagaaaccatcgctacgctggtcgacatggcggaacaggcgaccggccagaccggtagcgtcggcattggcattcccggttctctctcgccttacaccggcgtggtgaaaaacgctaactctacgtggcttaacggccagccgttcgatagcgatgtgagccgtcgtctgaagcgtgaagtgcggttagccaacgatgccaattgcctggcggtatcagaggcggtggatggcgcggcggcgggggcgcaaacggtatttgcggtgattatcggtaccgggtgtggcgcgggcgtagcgctaaatggccgggcgcacatcggcggcaacggtacggcaggtgaatggggccacaatccgttgccgtggatggatgacgatgagtttcgttaccgcgaagaaattccctgttattgcggtaaacaaggctgtatcgaaacctttatttccggtacgggatttgccacggattaccagcgtttgagcggtaacgcgctaaaaggcgatgagattattcgtctggtcgacgcgcaggacgccgtggcggaactggcgttaagccgttatgagctgcggctggcgaaagcattatctcatgtcgtgaatattctggatccggatgtcattgtgctgggcggcggtatgagcaatgttgagcgcctgtacaagacggttccgtcgctgatgaaatcgtttgtttttggcggcgagtgcgagacgccggtacgtaaggcgcggcatggcgattcgagcggcgtgcgcggcgcggcctggctgtggccgctggcgtaacgttgttagccggatggcgcgtcatccggcaaccggcgtgaccgatggctgcttgtgttttagacgtccgtataccagcaacgacgacatggcggaaaacgagagcagggcggcgggaagcgccacatagtggtacgcaaaacctagtgtcagcatcagcccgccgcaccaggcgccaatcgcgctaccgagattaaacgcgatttgccctcccgccgcgcccagcagttcgccgcctttggcgttttgcagtagcaggatttgcagcggcgcagagagcgcaaacagaccagcgcagcagataaacgcgaaagtcagcgatgtcgttttgtatccgctgaagaaaaagagcgccatgagagaaagcacgataacgaggtcagtcactaccgcgatgcgcagcggagtatatctgccggagagtttgccgcttaacagattgcctaacaccatccccagcccgaccagcatcataataaacgtcatgctcgtctccgaaaaaccggagatgtacatcataaatggcttgatatagctgaaccaggcaaaaacgcccgcattgccgaacatcgtggcggcgaaaatgagccacggcgaggggctacgcaagaagtgaaactgctcgcgcaggctgccttgggctttgtcgcgaatatccggcacccagaagaaaattgcggtgagcacggcgatgttgaaaaccgcgatcaataaaaaggtgtagcgccagctaaattcctggctcaggtaagtgccgaacggaatgcccaccagattcgccaccgtcatccctgaaaccatacccgcgacggcggcggtgaccttcccggggcggataatctttgacaagacaatggcgccgacgccaaaaaaggcaccgtgcggaaagccggaaaccagtctgccgacggcgagcatcagatatgacgaggaaaaggtaaatatggcattgcccatcacgcacaacatgaccagaaacaacagtatatgtttaagcgaaaagcggctggaaaagagcgccataacaggcgcgcccagcacgacgccgaaggcgtaaaacgagatcatatgcccggcggcgggaattgttatcccgacatcgcgtgccagctccgtcagcacgcccataatgccaaactcggccatccccagtccgaacgtacccagcgccaaagaaaaaataacttttttcataccacctgccgaaaataaaggcgcatgttgcgcgctgtggctgtgaattgtcacagccaatcaacgtatagcttgcggataagcgcgaggtaataccattccttatccgtctttgtgtattcattattatgctatgtcatgacggtatgctgtgcgcaggatgacactcgtgttactccacggcaaacgctttgtccagtttgctataaccaagcccattgatttttttcacttttatctgcacagggatacgttctttcatggcttccacgtgactaatcacaccgatggtcttcccgctggcattcagcgcatcgagcgcatccagcgcggcgtccagcgtttcgctatcaagcgtgccgaagccttcgtcgaggaacaaagaatcaatgcgcgttttatggctgaccaaatctgataacgccagcgccagcgccaggctgaccaggaaactttcgccgcctgataacgttcgcgtatcgcgcacggcgtcggcctgccaggtatcgacaacctccagttccagcgcgtcgctggctttgcgctgcaataaatagcggccatgcaggcgggtgagctgatgattcgccagccagaccagattatccagcgtcagtccctgggcgaatttgcggaacttatcaccttctttagagccgatcagcgcattgagatagccccagtcttccacttgctgagaggcttgcttcatttccgtcatcagcgcgcgttggcgctgccgattatctgcatcctgtttaatttgctggcggatttccccctggcgtgtcgtgttctcgcgcagttgttgcgccaactgcgtcagccgctgcgcgagctgctccgccgtacacgttgggtccagacctgcgggcggctgttgctgatggtcagccagcgcctgcgcggactgcgcgcttaacgccttcgcttgttgtagctgactttccagcgtttgttgttgtttttccagacgggtcacggtctcttcatccagcaacgccgccaggaacgttgcctggctgtcaaacgggctattttttaacgccgcatcaaagtgcgctatcgcctcggcggcgcgctgctgctcctgcgtcgtttgttcctgcagggtttgcaactggctttgtaatgacacgcactcatcatgcgcctgccgccagttatccagcggcacgtcgtcgtcggaatccgcggtatccgtttgcggtagcgtctccagcaacggggcaagcctgtcgatctgcatttgcaaatccgcgaactctgtctgacgctgttgccatattttcgcttcgtcggcgcgctcattcagccacgaagcctcgtcttctggcgcaggaagggaaagcgtatactgcgccaaatctgccgtcagcgacgcctgacgctgcgcaatctgcgcggtaaagcgcgctacctgttcagtatgcgccgcgatttgcgtttgtagagcatgacgctggctgagctgatccaactgttgctcatgctcttccgcggcggtcagccagcccgcgaggtcttcttgcggctggagctgaacgcccagcgtagcgcacagcgtttgccattcctcagtaagcgcttgctcctcctgcaacaacgactgcgcctcgctttcatcccgctgtaattgttgcgttaaggcatctaactgtcctcgcagcgccgcgccttcttccgccagcgttttgacctctttttccagcgcgtcgcggcgggtttgattcgcgctcagttccagcgcctgataggcggcgatggcggggtgcgtcgtcgagccgcaaagcggacacggctggccggactgtaagtgcgcccgctggctttccagatctttgatgcgcgcctcctgctcgcaaatagtgcgaacgtccgcaagctcctgcgctttagtcttataactcaaacgcttatccgccagacgttgggtgtattgcgcctgctcctgatgatgacgcgcgatagctgcctgtagctgcgcctgacgcttttgtttcgggagaatttgcccctgaagcgcggcgagacgatggcgtagcggacgctgccgggtatgcaatgctctggcttccgccagcgcctgtggcgtgaggtcgagcgtgagcggcggtagcgcatcacgctgacgcgtatcgctcagcaactgctgttgccattggctcagttgcgcccgatcgtgggattgttgtgttaataatgctcgccaccccgccagttcgctgcgccagacgcggatgccgtcgtgttccgccagccatgtcttcaaccgctgccctgtggcgttcagttgcgtgaattgtcgatgcgcgcaggcgcggatacgctggcgcaggcgatacgcgctttgtaagcgagcattcacttcatcactgtgctggcgaacacgctcaacggcgcgggtttgttcctgaatgcgctcccagtgcgggcgcaactggcgagcaggttgcgccagtgtcaacgccgcgagctgcggctgcgctttttctcgcgcctcttgcgccgcgtacagcgcctgctgccgggcgtgtaattcagtgtggagctcgttttttcgggtcagccagtgaaggtgctgctgctgtccctgctggtcggccagcaggcgtttctcttcgtcagtaagcgcctgcaaactggcttccagttgctgtaactgttcgtccgccaatagggcgacgccgctggcctgcgcttgtaacttttccagttcgagacgggctgatttatgtttttcaaatacctgtgcggagatctgcccgtaaatctcagtgccggtgagctcctccagaagctctgcgcgctctttcgctttggcgttaagaaaggcggcgaactgcccctgtgataacaacatcgaacgggtgaagcgcccgtagtccagcccggtcaacgtggcgatcatctccagtttatcctttaccttatcggcaaagatctttccgtctgaacaccgtgccagctctacgcgtggggcctggagattgccgtcaggctgatttcgggctcggttctggctccagaacgcgcgccaggcttcgccttttacctcaaactccacttcggccagacattccgctgtatcgcgcgtcatcaaatcgttttgcgattgcgataccgtattcaggcgcggcgtttcgtggtacagcgccaggcagatggcgtcaagcaaggtggtttttcccgcgccggtcgggccggtaatggcgaataacccgttactggcaaacggttcggcggtaaagtcgaccttccattctcctttcagcgagttcaggtttttcagacgcaaactgagaattttcatgcctcatgctcctcattcaacgcgtagagcgtgctggaaaagagctgattcaggcgctcgcgctgcgggggatctaacgcttccagcgccagacgccgcgcaaaaacctcctccacgctaagctcgcttaatgtttcccgccgctcgttcgccagcgagcgctcgcgctgttcgcggctacggcgcaccagtaatacctctacggggagtgactccgttaatgtctgtattctgcgttggatatcgtgcagataatcatcggtggtgatttcaatatccagccagacggggggcgattgctcaacgccgcgccactgctcaagctgttcggtaattgacgccaggtcgccttttaaaaccgccagcggttgagtcacggggacagccagactttcggtactttgccatttcccctgctcgaaggtcaccagatgcacgcatttgcttttgccgcactcatcaaagctgagggcgatgggtgagccgcaatagcggatatgctccgtgccgccgacacattgcgcgcggtgaatgtgtcccaatgcgatataatccgcgggggggaaatgctgcgccggaaaggcatccagcgtaccgatataaatgtcgcgaaccgcatcgcttttgctggcgccgacggtggttaaatgtcccgtcgcgataaccggcagctttcgttcgccgcgtagttggcacgcttcctgatactgctgttgataataatcggcaatcgcatgaagaagttgctgctgtttctcgctgccggataatcccgcctgactggtaataatgtcgcgcgggcgcaaaaagggaatggggcacagtacggcgcccggagacccgtcgcgacgatgaagtagccgcggcgcatagcccgcgctggcgatcacggttgtattgagaaacgccagaatgtcgcgcgattcgtttagcgtggcgacggaatcatgattaccggccagcaccaccagatgacagcccgtttgctgtaaattaacgacgaaacggttataaagttctcgggcatagcttggaggcgaaccggtatcaaaaatatcgccagcgacaataatggcatccacctgatgggcctgcgcggtctccagcagccagtccagaaaagcctgatgctccgcggcgcggcttttactgtagaaattttgtcccagatgccagtcagaggtgtggaggatgcgcataattgttccatgcaaaaaaagcgtgaacgggattatacacgtcatcccttccatttttgggcgcaatttaccgccggtacacggtaatgcatggtttcaccggtgtcataaatcatcaacatgctgtcaatgccgcctttttttttcataaatctgtcataaatctgacgcataatggcgcggcattgataactaacgactaacagggcaaattatggcgagacgtattctggtcgtagaagatgaggcgccgatccgtgaaatggtgtgcttcgtgctcgaacaaaatggctttcagcccgtagaagccgaagattatgacagtgcggtgaataaacttaatgaaccctggccggatctcatccttcttgactggatgttgcccggcgggtcagggttacagtttattaaacatctcaaacgtgaagccatgacccgggatattcctgtggttatgctgaccgcaagaggtgaggaagaagatcgtgtgcgcgggctggaaaccggcgctgacgattacattaccaagccgttttcccccaaggagttggtggcgcgcattaaagccgttatgcggcgcatctcgccgatggcggtcgaagaggtgatcgagatgcagggactgagccttgatcccggctctcaccgcgtgatgaccggcgacagcccgctggatatggggccgaccgaatttaaattactccatttctttatgacgcacccggaacgggtttacagtcgcgagcagctactcaatcatgtctggggcaccaatgtgtacgttgaagaccggacggtcgacgtgcatattcgccgtttgcgtaaggcgctggagcacagcggccacgaccggatggtgcaaacggtacgcgggacagggtatcgtttttcgacccgcttttaatgccttttccgccagtagaacacaggtttctggcggagaaggctttccattcttgagggagtatgacgcgtgctggaacggctgtcatggaaaaggctggtgctggagctggtgctctgttgcatccccgcgcttatccttagcgctttttttggttatctgccgtggtttttactggcggcggtgacgggactgcttgtctggcatttctggaatttgttacgcctctcctggtggctttgggtcgacagaagtatgacgccgccgccgggacggggaagttgggaaccgctgttatacggtttacaccagatgcagttgcgaaataagaagcgtcgccgcgagctggggaacctgattaaacgttttcgcagtggcgcggagtcgctgcctgatgccgtggtactgaccacagaagagggcggcattttttggtgtaacggtttggcgcaacagatactggggctacgctggccggatgacaacgggcagaatattctcaatctactgcgttatccggagtttacccagtatttaaaaacgcgtgatttcacccgtccgcttcatttggtgctcaataccgggcggcacctggagatccgcgtcatgccttataccgataaacaactcctgatggtggcgcgcgatgtgacgcaaatgcatcagcttgaaggcgccagacgtaactttttcgccaacgttagccatgagttgcgtacgcccttgacggtattgcaaggctatctggaaatgatgcaggaacaggcgctggaaggggcgacgcgagagaaagcgctgcatacgatgcgcgagcaaacgtatcgtatggaagggctggtaaaacaactgcttacgctgtctaaaattgaggcggccccggcgctgttattaaatgaaaaagtggatgtaccgatgatgctgcgggtcgtggagcgtgaagcgcagacgctcagccagcagaaacatacctttacgtttgaggtcgacgatagtcttagcgttctgggcaacgaagagcagctacgtagcgcgatctcaaacctggtgtataacgcggtaaaccatacgccggcgggaacgcatattacggtgagctggcgacgtgtcgcgcatggcgctgagttttgcattcaagataacggtccggggattgctgccgagcatattcctcgtctgaccgaacgcttctaccgtgtcgataaagcgcgttcgcggcaaacgggcggcagcggcctgggattggcgattgtgaaacatgcgttgaatcaccatgaaagccgccttgaaatcgacagttcgcctggcaaaggaacgcgatttagctttgtgctgccggaacgtttaattgccaaaaatagcgattaattgcctttcgtaagtataactttccataagccagcggatgctggcttattttctttgcagttaagacgggctcgttgaaacattcaacgtttggtggttttttgttcgcatgattagccataactttttcatgagaatggtgttttattctggttgtaaatttcatatcgctatattcatctggtttttagatcccatcttgctttaaaacgttataagcgtttaaattgcgcttcaggtgctgtcattacgactgcatttgcgcggtaaatcgaaaaacaattcttcgccgcatcggtccgggagcttttcccgctgaaattgataaaaaacgccgctttataatcctccgggaaaggcaaaaattttaatgtttacaacatcaccatccacaggcagtaagactttatgacccatcagttaaaatcgcgcgatatcatcgccctgggctttatgacatttgcgctgttcgttggcgcaggcaatattatctttcctcctatggtcggtttgcaggcgggtgaacacgtctggacagccgctattggctttctgattaccgccgtagggctaccggttcttactgttgtggcgctggcgaaagtcggcggcggcgtagacagcctcagtacgccgattggtaaagtggcgggactcctgctggcgaccgtttgctatctggccgtcgggccgttatttgcgacgccgcgtaccgcgacggtgtcgtttgaggtcggtatcgctccgttgactggcgattctgcaatgccgttgctgatttacagcgtggtctatttcgctatcgttattctggtttccctctatccgggtaagctgctggatacggtagggaatttcctggcgccgttgaaaattattgcgctggtcatcctgtccgtcgcggctatcgtttggcctgccggtccaatcagcaacgccctggacgcttatcagaatgcggccttttctaacggatttgtgaacggctatctgacgatggatacgctgggcgcgatggtgtttggtatcgttattgtgaacgcggcgcgttctcgcggcgtgaccgaagcgcgcctgttgacgcgttacacggtctgggccggcctgatggcgggcgtggggctgacgctgctttaccttgccttgttccgcttaggttctgacagcgcgacgctggtcgatcagtcagcgaacggcgcggcgattcttcatgcctacgttcagcatacctttggcggcgcgggaagcttcctgctggcggcgctgatctttatcgcgtgtctggtgacggcggtggggctgacctgcgcctgcgctgagtttttcgcgcagtatattccgctgtcttaccgcacgctggtctttattctcggcggcttctctatggtggtgtcaaacctcggactgagccatctgattcaaatctccattccggtgctgacggctatctatccgccgtgtatcgcactggttgtattaagttttacccgctcatggtggcataattccacccgtatcatcgcgccggccatgtttatcagtctgctttttggtatccttgacggcatcaaagcatctgccttcggcgatatgctgccagcctggagtcagcgtttgccgctggcggaacagggactggcttggttgatgccaacggtggtgatggtgatcctggcgattatctgggatcgcgcggcgggtcggcaggtgacctccagcgctcactaaaatcgctgacatatgtgtacaccacggggcttaacgccccgtggttttttattgtgttgataggtcagaaattgatggaaagcaataataagctaaagcgtgggctgagcacccggcacattcgctttatggcattaggttcggcaatcggcaccggcctgttttacggctcggcggacgccatcaaaatggcggggccgagcgtgctgttggcctatattattggcggggtcgcggcatatatcattatgcgcgcattgggggaaatgtccgttcacaaccctgccgccagctcattttcgcgctatgcgcaggaaaacctcggcccgcttgcgggctacattaccggctggacctactgttttgagatcctgatcgtcgccattgccgacgtgaccgcgttcggcatttacatgggagtctggttccccgccgtgccgcactggatttgggtacttagcgtggtgctgatcatttgcgccatcaacctgatgagcgtcaaggtgttcggcgagctggagttttggttctccttcttcaaagtcgccaccattattatcatgattgtcgcgggtatcggcatcattgtgtggggaattggcaacggcgggcagccgaccggcattcataacctgtggagcaacggcggcttcttcagcaatggctggttgggaatgatcatgtcgctgcaaatggtgatgttcgcttacggcgggattgagattatcggtatcaccgccggggaagcgaaagacccggagaaatccattccgcgcgccattaactcagtaccgatgcgtatcctggtattttatgtcggcacgctgttcgtcattatgtctatctatccgtggaatcaggtcggcacaaacggcagtccatttgtgctgacgttccagcatatggggattacctttgccgccagcattctgaactttgtggtattgaccgcctcgctttccgctatcaactccgatgtgtttggcgtaggccgtatgctgcatggtatggcggagcaggggagcgcgccgaaagtctttgctaaaacgtcacgccgtggtattccgtgggtcactgtgctggtgatgacgattgcgctgctgtttgcggtttacctgaactacatcatgccggaaaacgtcttcctggtgattgcttcgctggcgacgtttgcgacggtatgggtatggattatgatcctgctgtcgcaaatcgccttccgtcgtcgtttaccgccggaagaggtaaaagcgctgaaatttaaggtgccgggcggtgtcgtaacgacgatagcgggtctgattttcctggtcttcattattgcgcttatcggctaccatccggatacccgcatctcactgtatgtgggcttcgcctggatagttctgctgttgattggctggatatttaaacgccgtcgcgaccgtcaattggcgcaggcgtagtcgtttttctctgccttatccggtctgcaggcaacggtagaccggataagcggagccgcttctcctcctggagcctcctcccctaataaacccctggatgatgagttatcctttaaatctctgtggcaaggtggccccattttcagtagaggggatacgagatgttgaatgcctggcacttaccggttgccccatttgtgaagcaacataacgataaattaaccattacgctgtggctgagcggagaaaatccgccgtctcgcgtgacgttgcgctcagaattcgataatgaagaaatctcactggcgatgcgcaaacagcgccgccagccgcagccgggcgtgacggcgtggcgagcgacgctcaatatcgcgttagggcaaccccgtcgccgttacagctttaaattgctttggcatgaccgccagctttggtttacgccacagggatttagccgttttccgcctgcgcgtctggaacaatttgcggttgatgtgccggatagcggcccgcagtgggtcgccgatcaaattttttatcagatcttcccggatcgttttgcccgcagccagtctcgtgaagccgggcaggaccgggtgtactaccatcatgccgcaggtcaggagattgtgctgcgcgactgggacgatcctttaaccccccaggcgggcggttccaccttttacggcggctgtctgaatggcatttgtgagaagctgccgtatctgaaaaaactgggcgtcacagcgctatatctgaatccggtatttaccgcgccgagcgtccataagtacgatacggaagattatcgccatgtcgatccgcaatttggcggcgatcgggcgctgctacgcctgcggcgtaaaacccaggtgcagggcatgaggctggtgctggatggcgtgtttaatcatagcggcgactcgcatgtgtggtttgacaggcataaccgcagcactggcggcgcgtgccatcacccggactcgccgtggcgcgactggtactccttttcaccacaaggcgtggcgctggactggctgggttatccgagcctgccgaaactcgattatcaatcagaaacgctggtcgatgagatctatcgcggtgaggacagtatcgttcgtcactggctaaaggctccgtggaatatggacggctggcggctggatgtcgtacatatgctgggcgaggcgggcggggcgcgtcataatttgcagcacgtcgccggtattacccgggcggcaaaagaggcgcagcccgaagcctatattgtgggggaacatttcggcgatgcgcggcagtggctacaggccgatgcggaagatgccgccatgaattatcgcggcttcaccttcccgctatggggatttctcgccaatactgatatcgcttacgaaccacagcatattgatgcccggacctgtatcgcgtggatggataactaccgcgccgggctgtcacatcagcaacaactgcgcatgtttaatcaactcgacagccatgatactgcgcgctttaaaactctgctgggtaaagacgcggcgcgcctgccgctggcggtggtctggctgtttacctggcccggcgtgccatgtatttattacggcgatgaagtcggcgtggacggcgcaaatgaccccatgtgccgcaaaccgttcccatgggatgaacgcaagcaggacggcaacttgctggcgctgtaccagcgtatggcgaaactgcgccagagcagtctggcgctgcgtcgtggcggatgccaggcgctgtatgccgaaggtgacgtagtggtattcgtgcgagtttatcagcagcagcgggcgctggtggcgattaaccggggcgaggcctgtgaagtggcgctggaagcgttgccgttgctgaacgtggccggatggcaatgtaaaacgggaagcggtgatatccgcgagggaagacttagtttacccgcgatttccgcgacggtatggatgaatcgttgaggcgaggtggttcgtaacaccttacgcataaaaaaggctcgcattcgcgagccttttatcaatgcactgacttacaggctggaaatgttctcagccaggtatttagccacgccgtccggagaggcgttcatgccttctttgcctttttcccactgcgccgggcagacatcaccgtgctcttcgtggaactgcagcgcgtcgaccatacgcagcatttcgtcgatattacgacccagcggcagatcgtttacgacctggtggcgaacaataccgttagcgtcaatcaggaaagagccgcgcagcgcaacgccttcgtccgggtgttcgataccgtaagctttctgaatttcacgcttcacgtcggcgaccattgcgtatttcaccgggccaatgccgcctttatcgacaggggtgttacgccatgcgttgtgaacgaactcagagtcgaaagaaacgccgaccacttcaacgccgcgcttctggaattcttcataacgtttatcaaaggcgatcagctcagacgggcaaacaaaagtgaagtccatcggccagaagaacagaacggtcgttttaccattggtgtgctgtttgaagttgaatttatcaacaatctcaccgctacccagtaccgccgcagcggtgaaatccggggcctgacgagtaaccagtaccataataattctcctgcaatattaagggttttagaacgcaacgcgggcagtatagggagggcgaagcgacaaaacaatgcggtcttgacaatcaatgagacagcttttgcctatcgatcgggtcattataaatcgtaatgatgacccttttatgacagcgaacgatctttctgccaacggcggatctgacgcacgccctcgctatcaggccgtcacagcgctttgcgggcggcctgtgccatcatacgcggataaaaatgccagaagcgctcttctaacgcgtcgtagtgcgcgtccagatcgtaccaggaatcacgcaaggcatccagccggggacggcgattcgccatgccattcagcacgttttgaatgaaatccatatcgcgataccgctctaaccatttttctgaccaaagataatcattcaggttgacaaagcgcggcggggagtcgggcagaatcgtcgcgacctgcgcatgggcgtagccgacaaacgcctgaagtggaaaatcgggagagatttgcgtccagtgacgcgataaaaaatgatcccacatgacgtccagcgtaatgggcgccacgcgccgcgtttcatggcggaaccactctcgcgcctcacgaacttccggcaggttgtcggtcatgacgtcaatacgccgatgcatataaataccctctaccacgtcaggaggataatgcgttgccgggttaccgcggacaaaatcggccagaagattaccggaaagcgagctgtcggcaaggtgcgccagatgcaggtgagcaagaaaattcattattgattctctgtccaaaaagcgggtaacggttgcagcgggaacgccccggcactagactacccgcctcttattttagtctgagtcagagtcatgcgcgttaccgatttttcctttgaactacccgaatccctgattgcccactacccacagccggaacgcagtcgctgccgtttgctgtcattagaggggccgacgggcgcgctgacgcacggtactttcaccgatctgctcgataagctcaaccctggcgatttgctggtcttcaataatacccgcgtgatcccggcgcggctctttggccgtaaagccagcggcggcaagatagaagtgctggtcgaacgtatgctcgatgataaacgcatcctggcgcatattcgcgcttctaaagcgccaaaaccgggtacggaactgctgctgggcgacgacgaaagtattcacgcgaccatgaccgcgcgtcacggcgctctgtttgaagttgagtttaatgacccgcgtccggtgctggatattcttaacgccatcggccatatgccgttgccgccgtatatcgaccgtccggacgaggacgccgaccgcgaactgtaccagacggtctacagtgaaaaaccgggcgccgtcgccgcgccgaccgcggggctgcactttgatgagccgctgctggcggcgcttcgtgagaaaggtgtcgaaatggcgtttgttacgctacacgtaggcgcgggcactttccagccggtgcgtgtcgataccattgaagatcacatcatgcactccgaatatgctgaggtgccgcaagaggtggtcgacgcggtgctggcggcgaaagcgcgcggcaaccgcgtgattgctgtcggcaccacctcggtacgctcgctggaaagcgcggcgcaggcggcaaaaagcgatttgatagagccgttcttcggcgatacgcaaatctttatttatccaggttatcaatacaaagtgattgatgcgctgatcaccaacttccatctgccggaatcgacgttgattatgctggtttccgcatttgccggttatcaacacaccatgaatgcctataagactgcggtagaacaaaaatatcgcttttttagctacggggacgcgatgtttatcacgtacaatccgcaggctatttctgagcgtccgtaagaaggctatctcacttgccattttgacgccgggcagtgctcgccatcctcacgtactgcgtgtacgctccggtggctgtgcgctggtcgaccccaaactggctgcgccgatgacgtcttcgggaatttattagctatggaatcattccgtagcgagtcgttaaacgtcggactgtttttctgacgcaggagtgataatgaaatttgagttagataccaccgatggtcgtgcgcgtcgcggtcgtctggtgtttgatcgtggcgtagtggaaacgccagcctttatgcctgtgggtacttacggtaccgtgaaaggcatgacgccggaagaagtggaagcgaccggcgcgcagattattctcggcaacactttccacctgtggctgcgcccgggtcaggaaatcatgaagctgcatggcgatctgcacgattttatgcagtggaaagggccgattctcaccgattccggcggcttccaggtcttcagcctcggcgatattcgtaagattaccgagcaaggcgtgcacttccgtaacccgatcaacggcgatccgattttcctcgatccggaaaagtcgatggagatccagtacgatctcggttccgatatcgtgatgatctttgatgaatgtacgccgtacccggcagactgggactatgctaaacgctcgatggagatgtcgttgcgttgggcgaagcgtagccgcgaccgttttgatagccttggcaataagaatgcgctttttggcatcattcagggcagcgtttacgaagatttacgcgatatctcggtgaaaggtctggtagagattggctttgatggctacgctgtcggcggtttggctgtcggtgagccgaaagcagatatgcaccgcattctggagcacgtttgcccgcagatcccggctgacaaaccgcgttacctgatgggcgtgggtaaaccggaagatctggtggaaggggtgcgtcgcggtattgatatgtttgactgtgtcatgccaacgcgaaatgcccgtaatggtcatctgtttgtgaccgacggcgtggtgaagattcgtaatgcaaagcataaaagcgacaccagcccgcttgacgccgagtgcgattgctacacctgtcgcaattattcacgcgcttacttgcatcatctcgaccgttgcaacgaaatattaggtgcgcgtctcaataccattcataacttgcgttactaccagcgtttgatggcgggtttacgcaaggctattgaagagggtaaattagagagcttcgtaaccgagttttaccaacgtcaggggcgacccgttccacctttgaacgttgattaattttaataatgagggaatttgaatgagcttttttatttctgatgcggtagcggcaacaggtgctccagcgcagggcagcccgatgtctctgattttaatgctggtggtgtttggtctgattttctatttcatgatcctgcgcccgcagcagaagcgcaccaaagagcacaaaaagctgatggactccattgcgaaaggtgatgaagttctgacgaatggcggtctggtcggtcgagtgaccaaagtagcggaagccggctacattgccatcgcgctgaatgacaccacggaagtggttatcaaacgtgacttcgtagctgccgttctgccgaaaggcaccatgaaggcgctgtaatatttcgttttcccaaagggaactgccgtgttaaaccgttatcctttgtggaagtacatcatgctggtcgtcgtgattatcgtcggcctgctttacgcacttcccaacctgtatggtgaggatccggctgttcaaatcactggcgtgcgcggcgtcgccgccagtgagcaaacgctgatccaggtccagaaaacgttacaagaagaaaaaattcccgctaagtctgtggcactggaagagggcgctattcttgcgcgcttcgacaccaccgatacccagctacgcgcccgtgaagcgctgatgagcgtgctgggggataaatatgtcgtggcgcttaaccttgcgccggctacgccgcgctggttggcggctattcacgccgatccgatgaagctcggtcttgatctgcgcggcggcgttcacttcctgatggaagtggatatggataccgcgttaggtaaactccaggaacaaaatatcgatagcctgcgcagcgatctgcgtgaaaaaggcattccttataccaccgttcgtaaagaaaataattatgggttgagcatcacgttccgtgacagcaaagcgcgtgatgaggcgatcgcctatctgacgccgcgtcatcgtgacctggtgatttccagccagagcggtaatcaacttcgcgcggtaatgaccgatgcgcgcctgagcgaagcgcgtgaatacgccgttcagcagaacattaatattctgcgtaaccgtgttaaccaactgggcgtcgcggagcctgtcgtacaacgccagggcgcagaccgtattgtggttgagctgccgggtatccaggataccgctcgcgcgaaagaaattctcggcgcgaccgcgacgctggaattccgtctggtgaataccaacgttgaccaggccgccgctgctgccgggcgcgtaccgggtgattccgaagtgaaacagacccgcgaaggtcagccggtggtattgtacaaacgcgtgatcctcaccggcgaccatatcaccgactcgacgtccagccaggatgaatataaccaaccgcaggttaacatctcgctggatagcgcaggcggcaatatcatgtctaacttcactaaggacaatatcggcaaaccgatggcgaccctgtttgtggagtataaagacagcggtaagaaagacgctaacggtcgcgccgtactggtgaaacaggaagaagtgattaacattgccaacatccagtcccggctgggtaacagcttccgtattaccggtatcagcaacccgaacgaagcgcgtcagctctcgttgttgctgcgtgcgggcgccctgattgcgccgattcagatcgttgaagagcgcaccattggcccgactctgggtatgcagaacatcaagcagggcctggaagcctgtctggccggtctggtggtctccatcctgttcatgatcttcttctataagaagtttggtctgattgcgaccagcgcgttagtggctaacctggtgttgattgtcggtatcatgtcgctgttgccgggggcaacgctcagtatgccggggattgcgggtatcgtgttaacccttgcggtggcggtcgacgccaacgttctgattaacgaacgtatcaaagaagagttgagtaatggccgcacggtacagcaggcgataaacgaaggctatgccggcgcgttcagttccatcttcgatgcgaacatcacgacgctgattaaagtcatcattctgtatgctgtcggtaccggggcaattaaagggttcgcgattacgaccggtatcggtgtggcgacgtcgatgtttaccgcgattatcggtacgcgtgctatcgtaaacctgctatatggcggcaagcgcgtcactaagctgtcaatctgaggagtgcgatgtggcacaggaatacactgttgaacaactaaaccacggccgtaaagtctatgactttatgcgctgggacttctgggcattcggcatctccgggctgttgctgatcgcggccattgtcattatgggcgtacgcgggtttaactgggggctggatttcaccggtggtacggtaattgaaatcacgctggaaaaaccggctgaaatggacgtgatgcgcgaagcgctgcaaaaagcgggctatgaagagccgcagttgcagaactttggcagcagtcacgacattatggtgcgtatgccgccaaccgaaggtgaaaccggcggtcaggtactgggtagcaaagtggtgacgatcattaatgaagccaccaaccagaatgcggccgtgaagcgtattgaattcgtggggccaagcgtgggcgccgatctggcgcaaaccggcgctatggcgctgctggtggcgttgatctctatcctcgtttatgtcggtttccgctttgagtggcgactggcggcaggggtggtcatcgcgctggcgcacgacgtgatcattacgctggggatactgtcgcttttccatatcgagattgacctgaccattgtggcatcgttgatgtcggtgatcggttactcgctgaatgacagtatcgtggtctctgaccgtattcgtgaaaacttccgcaaaatccgtcgcgggacgccttacgaaatctttaacgtgtcgctgacccagacgctacaccgtacgttgattacctccggtacgacgttagtggtaattctgatgctgtacctcttcggcggtccggtactggaaggcttctcgctgacgatgctgatcggtgtctctattggtacggcatcttctatctatgtcgcatcggcgctggcgctgaaactcggtatgaagcgcgagcatatgctgcagcagaaagtcgaaaaagaaggggcggatcagccgtccattctgccgtaaacacgtatttaagtgttatctgaatcccggtcatgcgatcgggatttttttatttatgtaccatgacgataaacattactgacagtatgctgtcaggagccctgtcatacactcctcatgaatttacccacactcgcaggaggatgtatgaaaaacttgattaactggtttgaaattccagttactgatatggcgcgtgcaatcgccttttatgagcaagtgatgcagatatcgttacgtcgggaaaccatggatggggcggacctggccgtattcccgtatgctgaacccggacccggcggagcgctgataaagcaggatgatgtcgctccagttgcgcagggagtcgttatttatctgcataccgccgatttgttagcctcgattgaacgtgtcgtccttgccggtggcaagtgtgttctggaacccatggttcccggagatgacattggaaccatcgcgttgtttattgacagcgaaggcaaccgaataggtttacatcaacctgcgtgatatttgctaaatgtagagagtcaatatgaccagacgcgctgaccgtttgtttcagatcgtgcaaattttgcggggtagacgactgacgacggcagcgctgttggcacagcggcttgcggtttctgaacggacgatttatcgcgatattcgcgatctgtcgttatccggtgtgcctgtcgaaggtgaagcggggagcggataccgtttaatggcaggttttgatctgccacccttgatgcttacccatcgtgaatcggaagcactgatggtggctatacggttattgaaaacctggggcggcgattcgctatcacgcgagcttgaatccgcccaggaaaaagtgttggccattttgccggaagagagccgccgtaaagcggagcagacacggatttacgctccggatttgggtacatctccacattcgcgcagcgcgtttgatcttatccatcaggccgtttcggcgcagcaggtgttggcgctacattatcgtgatgaagcggggcatctctcttcgcgggatatacaaccgctgggattgtttttctggggagagcactggctgctggttgcctggtgtgagagacgggaagactatcggtgttttcgcctcgatcgctgtttacaaattactccgcttaaccggcgatttcgtgaaacaatcgaccgttctttgcgtgattttttgcgaaaagtcgagcacgaaaaaatgccgtaagatgtgatagcgatacctctaacgcttgtaaaacgggttgattggtcatcagtttgcctgaaatagccttgcttacctggatatataagttgcacagaatcattgctaaaagcccggcttcgcgggaaactgggcataaccctttgtattattcaggtacctgttaattatggctatcatcccaaaaaactacgcgcgcctggaaagcggctatcgtgaaaaagcgctgaagctgtttccgtgggtgtgcggacgttgttcccgtgagtttgtgtattcaaatctgcgtgagctgacggtgcatcatatcgatcatgaccacaccaataacccggaagacggcagcaactgggagctattgtgcctctactgccacgatcatgagcattctaaatataccgaagccgatcagtacggttcgacggtcattgccggggaagatgcgcaaaaagatgtcggcgaggcgacttataacccgtttgccgatctgaaagcgatgatgaacaaaaagaaataagcagactgctgacaaagctgttggtgctgttgaatgttaggttacgcttcgctccacccaacggaatccgcaatataaatgaattattggttttcgtaggtcggatgcaatctggcattttttcagccccggagtttgtcgccagccccaaatgtcctgtaacgcatacattgtcactggaatcccgatcgcaaggttgggatttttttgtttttaagtcctgccgatactggcgagcagagtagaatcagcggtaagccggggcaacccggtgaggcgcaatgttgcgggggcttgatccccggtggccttgtcgctggaaagagaaaacccccgcacattgttcggtattcaccggcaacattacgggggctaacttgactccagacaagttgaggatagccgcgaaccgttgccattgcaacaaaggcggcaatatgacgctcacagagttgagcattactatctggcacgatctggcggcaccaacgctggtcgggattgcgacaggtctgtttttaggctggtggcatcgccggaagtaatgtgaagtgggcgcgactcgccgccgcatggcagcatgcgcccgaaacgggccagaggacgacctctggccttttttgcaggtttagaagttgtaacccacgaccaggtagccgccccagccggtagatttcgcgctgaaatcgccgtcgccccagttcagttttgcgccattctgccactgtccgccgttatggaagtaacgcgcaacgaccgagtagtgccagtgatcgtagttcagcgccaggatatggctggaagcgatggagttgctggtacggttcggatcgtcgcctaaatcagatccccagtcaaagttggtaaagccgatatagctcagtttaccgccccacagatcggtgatggggacgaagtatttcactttgaaacggtagccgtcccattcgttttcattggacgcgccgtagttttgccactgatatttcgcatacacgttcagcgacagacccatcggcaggccggtgtcgatatcggtccccagacccatataccacgtgctctggcggctggctttgttatcgcccatatcgtagatgtagttgttggcgaaataccactctttaaacgggccgaagctcaggtctgcgccggtcagcttatcaattgagaaacgcggttcgatttccatgaacagcggagaaccgtcggaccagatacctttatcgttgccgttaccccaatcaaaggttttgggaatatcgatatagccgtagaaatcaaaccagtcttttttggcaaatgcttcatattccagatagacgtcgttgttcaatttcggcgagaaacgggtatggtagctgcctaccacgtttacgctctggtgccaccagtcggacaaatactgcggctgatcattttctgctgcgttagcagtaaaagatgaggtgagcgccagcgctgcgctgactgcgagtaaagtttttttcatatgtatgccactgtttgaaatcccttgcgggagtgaaaagaacgcaatttgcgtttctaaatatttcgtgtttctgcggagcctattataaaaatcattgctcacaaaaatatgtcttgtttcacatatctatcatttacgtaatcgattgcgttcacgtttgcgcattttagacgcggcgacagtactatctttcatgaatattaccaatccatgtcataaatgacggaaatgtcagtagggcaacaaaagtcgcgcgggggatgttgcggaacgcacaaaacgctccgccagaacgtttattgattaacaggctgaatatcatggatgcgaatgaagcctaactgcgccggtgtgatccccttcaacggtaacgaaatattgacatcactgggcgccagcaagctggctggggcatttaccagaaggctctgtgcattcacctcctgatagttctccgtagtgccctgaagttgcccgtactctacggtagcgctgaatgccggcagtggatcgcgggactcgccctgaatgtgtaacgttgcgtgagcgccgtctgcgacaggcgtaatttccagcaatgtcatacgtagcgtaccgatctggctctccagccgggcaggcgtattggcgccaggcaacaaatagacgccgcgggttgactccgcattcagcttattttgttgggtaatttttaccgtttcctgattcagttgggtcatctctttattcagggtgctaatgctttgatgcatctggcgaacttcgctctgcggcgcgcaggcggtcaggctcaagagacttcccaccaggagaattcttaggtaacgtcttgtcatgtcgatcatttccttcatggttcgatagcgtaatggtagtgcgctatacgcacaaaggcaccgatcctttatctcaaaagcgctccgcctttgttgtcgcgccagttcagggtaaaataacatttcctaaatcatctggtcaggacgccgtatgcattgcccattttgtttcgccgtagataccaaagtcattgactctcgtcttgtaggcgagggctcgtccgtgcgccgccgtcggcagtgcctggtgtgtaatgaacgctttacgaccttcgaagtggctgaactggtcatgccgcgcgtgataaaaagcaacgatgtgcgcgaaccctttaatgaggataagctgcgtagcggcatgttgagagcgctggaaaaaagacccgtcagcgcagatgatgttgaaatggcattgaaccatattaagtcacaattacgtgccactggggagcgtgaagttcccagcaagatgattggcaacctggtcatggagcagctgaaaaaactcgataaagtcgcgtatattcgctttgcctccgtctatcgcagtttcgaagatatcaaagactttggcgaagaaatcgctcgcctacaggactaagccatgcaggatgagttttacatggcgcgagcgctcaaactggcgcagcgtggacgtttcaccactcaccctaaccctaatgtcggctgtgtcattgttaacaatggcgacatcgtcggcgaaggttatcaccatcgcgccggagagccgcacgccgaggttcatgcgctgcggatggcgggcgcaaaagccaaaggcgcaaccgcctatgtcacgcttgaaccctgtagccatcatgggcgaacgccgccatgttgcgatgcgctgattgcggccggcgtcgcgcgcgtggtcgccgcgatgcaggacccgaacccacaggtcgccgggcgtgggctgtatcgcctgcaacaggcgggtattgcggtcagccacgggttaatgatgagtgaagcggaggcgctcaataaaggcttcctcaagcggatgcgtaccggattcccttatcttcagcttaaactgggcgcctccgtcgacggacggacggcgatggccagcggcgaaagccagtggatcacctcgccgcaggcccggcgtgacgttcagcgcttgcgtgcgcaaagccacgctatcttaaccagtagcgcgacggtattggctgacgatccggccttgacggtgcgttgggcggagttagacgcctctacgcaggcgtcttacccgcaggaaaatctgcgccagccggtgcgaattgttatcgacagccaaaaccgggtaacgcctgcgcatcgtattgtgcagcagcctggcgaaacgtggatcgcgcgtacccaggaagatagccgcgcgtggcccgatgcggttcgtactatcagcgtgccggcgcacaacggacatttggatctggttgtgctgatgatgcagttaggcaggcagcagattaatagcatatgggttgaagccggaccgggactggcgggcgcgttgctgcaagccgggctggtggatgaactgattgtctatgtcgcgcctaaattgttgggaacccaggcgcggggattatgcgaattgccggggcttgagaagctcgccgacgcgccgcaatttaccttcagcgaaatacgtcatgtcggcccggatgtttgcctgcatatggtgagcgcatgagttctcccgtcgaaaggggagcagcgctcaaattattatgataaaatccgcccccctgcggggccaaatgaaccctggaagagagaatatgaacattattaaagctaacgttgcagcccctgacgctcgtgtcgccatcactattgcgcgtttcaatcagtttatcaacgacagcctgctggatggcgcggttgatgccctgacgcgtattggtcaggtaaaagatgataatattaccgtagtgtgggtgcctggcgcctatgaactgccgctggcgaccgaagcgctggcgaaaagcggtaaatacgacgccgtggttgcgctgggaaccgtgattcgcggggggactgcgcactttgaatatgtggcaggcggcgccagcaatggcctggcaagcgttgcccaggacagcggcgtgccggtagcctttggtgttctgaccaccgagagtattgaacaagccatcgaacgtgctggtacaaaagccggtaataaaggcgcagaagctgcgctgaccgcgcttgaaatgattaatgtattgaaagccattaaggcctgattttttgtaaggggaattccgtgaaacctgctgctcgtcgccgcgcccgtgagtgtgccgtccaggcgctttactcctggcagttgtcccagaacgacatcgctgatgttgaataccagttcctggcggaacaggacgtaaaagacgtcgacgttctctatttccgtgaactgctatccggggtggcgactaacagcgcgtacctggatggtttaatgaaaccgtatctgtcccgcctgcttgaagagctgggacaggttgaaaaagccgtgctgcgtattgcgttgtttgagctgtcaaaacgcagcgatgtgccttataaagtggccatcaacgaagcgattgaactggcgaaaacctttggcgctgaagacagccacaaattcgtcaacggcgtactggataaagcagctccggtgattcgtcccaacaaaaagtgattcacaggccggaaagatagcgggcgctcgatacccgccgtctccggccttttctttttttctgctgaggcataacgtatggcatgtggcgagttttccctgattgcccgttattttgaccgtgtaagaagctctcgtcttgatgttgaaaccggtattggcgacgattgcgcgctcctgaatattcctgaaaagcagaccctggcgatcagtaccgatacgctggtggcgggcaaccacttcctccctgatatcgatcctgccgatctggcttataaagcgttggcggtgaatttaagcgatctggccgcgatgggggccgacccggcctggttaacgctggcgttaacgctaccggaagtggatgagccgtggctggaggcttttagcgacagcctgtttgcgctattgaattactacgatatgcagctcattggcggcgacaccacgcgtggaccgctgtcgatgacgctgggtatccacggttatatcccggcagggcgcgcgctcaagcgatctggcgcgaagccgggcgactggatttatgtcaccggtacgccgggcgacagcgctgccgggctggcggttttgcaaaaccggctacaggtgtcggaggagaccgatgctcactatttaattcaacggcatttacgtccgacgccgcgtattttacacggccaggcgctgcgtgacatcgccagcgcggctatcgatctttccgatggtctgatttccgatctggggcatatcgtcaaggccagcggctgtggggctagagtggatgttgatgcgttgccaaaatccgatgcgatgatgcgccatgttgatgacgggcaggcgctgcgttgggcgctttccggcggcgaagactatgagctgtgctttacggtgccggaactgaaccgtggcgcgctggatgtcgccattggtcaactgggtgttccctttacctgcataggccaaatgagcgcagatattgaagggctgaattttgtacgtgacggaatgcctgtcaccttcgactggaaaggatatgaccattttgccacgccataaagatgttgcgaaaagtcgcctgaatttgcgcaatccgtggcacctgctcgctaccggctttggcagcgggctgagccccgtggtgccgggcacgatgggctcgctggcggcgatccccttctggtatttgatgacgtttctgccgtggcagctttattcgctggtcgtgatgtttgggatctgcattggcgtttatctttgccatcagacggcgaaagatatgggcgtacacgaccacggcagtattgtctgggatgaatttatcggtatgtggataacgctaatggcgttgccgacgacggactggcagtgggtggctgccgggttcgttattttccgcattctggatatgtggaaaccctggccgatccgttggtttgatcgcaacgtgcacggcggcatggggattatgatcgatgatatcgtcgccggggtgatatccgctggcatactgtattttatcggtcatcactggccgctcggtattatttaaagggtttgccggatggcggcataaacgccttatccggcctgcccctgaacaatatgtcgatttcgcaggcccgataagcgccgcgccatcgggcaatggcagattatttaaatcccactaccggatgctgtttgtacggcgtttcgagttcggcaatctgctccggtttgagcgttaaatcaacggcattcagcaactcatctaactgttcttcacgcgaagcgccgataatcggcgcggcgacgcctcgtttgctgagcagccagcccagcgcaacctgcgcccgcgttgcgccaagcgcctcgctgacgccagccagccgttccgctatttgcgcatcatttttatcgctttcatcgtataaatttttacccacgtcatccgagaccaggcgggccgtggtttctccccaggggcgagttaagcgcccgcgcgccagcggactccacggaatcacggcaacgccttcctgccagcacagcggtagcatctcacgctcttcctcgcggtagatcaggttatagtgatcctgcatggtgacaaacggcgcccagccgtgttgtttttgtagcgccagcgcctgggcaaattgtgaggcgtgcattgaggaagcgccgatatagcgggctttacccgcctttaccacgtcgtttagcgcttccagagtttcttctatcggcgtggtgtaatcccagcggtggatttgcaggatatcgacatactccattcccagacgggcgaggctatcgtcaatagagcgcaggatttgtgcgcgggacaatccttccggcagatcgccgacgcgatggaagactttcgtcgctaccaccacctcgtcgcgccgggcaaaatcacgcagcgcgcgaccgacaatctcttcgctgctgccgtcggagtagctgttggcggtatcaaaaaagttaatgccgccctcaagagcgcgcttgatgatgggacggctgctctcttcgggaagcgtccaggcgtgattgccgcgacttggctcgccgaatgtcatacagcccagacaaaggcgggatacccgaagatctgtatttcctaacgtgttgtattgcatgactccgctcctgttatacccgtcactcttcaagcatagcaggagcaaagaggggattatgccagccaggccttgattttggcttcaatgcctgcggcgtcaagccccagttccgcgcgggcttcttcctgcgttccttgcgggataaagaaatccggaagaccgatattcagcacaggtacaggtttacgatgggccattagcacttcgtttacgccgctgccagcgccgcccataatggcgttttcttccagcgtcaccagcgcgtcatgctgcgcggccatctccagaattaacgtgtcgtccagcggcttaacaaagcgcatgtcgaccagcgtggcgttcagcgcttcggcgactttcgccgcctcaggcattaaggtgccaaagttcagaatcgccagtttttcgccatgacgcttcacaaggcctttaccaataggcagtttttccagcggggttagcgccacgccctgcgcattaccgcgtggataacgtactgccgtcgggccgtcgttatagtgatacccggtaaataacatctggcgacattcgttttcgtcgcttggcgtcatgatcaccatatccgggatgcagcgcagataggagagatcgaacgcgccctggtgtgtttgtccatccgcgccaacgataccggcgcgatcgatggcgaacatgaccggcagtttctggatagcgacgtcatggatgacctgatcgtaggcgcgttgcaggaaagtagagtagatcgccacgacgggcttatagccgccaatcgccagacctgcggcgaaggtgacggcatgctgctcggcgatggcgacgtcaaaatagcgatccgggaatttacgtgaaaattccaccatgccggaaccttcgcgcattgccggggtgatcgccatcagcttgctgtctttggcggcggtttcacacagccagtcaccgaagatttttgaataaccgggcagaccgccgctgcttttcggcaaacatccgctggagggatcaaatttaggcaccgcatggaaagtgatcggatctttttccgcgggctcatagccgcggcctttcttggtcatgatatgcaggaactgcggccctttcaggtcgcgcatgttcttcaatgtgctgataagccccatgacatcgtgaccatcgaccggcccgatgtagttaaagcccagctcttcgaacagtgtgcccggcacaaccatgcctttaatatgttcttcggtacgcttgagcagttctttaattggcggtacgccggagaagaccttttttccgccttcgcgcagagaagagtaaagcttaccggaaagtagctgcgccagatggttgttgagcgcgccgacgttttccgaaatcgacatttcattgtcgttcagaatgaccagcatgtcgggccggatatcgcctgcgtgattcattgcttcaaacgccataccggcggtgatggcgccgtcgccaatcacacagacggtgcggcgatctttgccttctttctccgccgccacggcaataccgataccggcgctgatggaggtggaggaatgcccaacgctcagcacatcgtattcgctttctccgcgccacgggaacgggtgcagaccgcctttctggcgaatggtgccgattttgtcgcgacgaccggtaaggattttatgtggataagcctggtgtccaacatcccagattagctggtcaaacggggtgttgtagacataatgcagcgccacggtaagttctaccgtgcccagcccggaagcgaaatgcccgctggaacggcttacgctgtcgagtaagtagcggcgtagctcgtcgcagagtttcggcagactctctttcggtaacagtcgtaactcctgggtggagtcgaccaatgccagggtagggtatttggctatatcaaaactcatcgcaagctcattggatatggggtttatttatcacgctggattatgtagttcgctagcgcttccagtgccgaggtgtccagtgattgcgcggccagctgatgtaacgactgacgggcgtcctctatcaggtcccgggctttattccgggcttgctcaagacccagaagtgcagggtaggtacttttgccaagctgctggtctgcgccctgacgtttacctaacgttgcagtatcgcccaccacatccagaatgtcatcctgaacctggaaggcaaggccgatactctctgcatagcggtcaagtatcggcagagtattccgtcctttatcgcccgcgctcaatgcgccaagtctaacggcggcgcgaatgagcgcgccggtcttatggcgatgaatgcgttccagcgcgtccagagtgatccgctggccttctgccgccagatccaatgcctgaccgccgcacataccggcgataccgctggcgtttgccagttcggcgatcatcgcgatacgatcgcgatcggcgacttccggcatcggcgcgtcgctgataatggcaaacgccagcgtctgcaacgcgtctcccgccaggattgcgttggcttcgccaaatttaatatggcaagtcggcaggccgcgacgcaaatcgtcatcgtccattgctggcaggtcgtcatggatcagcgaataggcatgaatgcattcgaccgccgcagctggcgcatccagcgttgccgtactgacgccaaacatttgaccggtggcgtaaaccagaaatggccgcaggcgtttaccgcctaataatgcgccatactgcatggcttcgaccacgggagtgttctgaaagggcagtggcgcgataaaacggctcagcgcctgattcgcttgcgttacgcaagcctgtagctgctgcgtaaagtccatttactcattatccgcgataaaaggctcaggtgaagcctcttcattatcagacagcaaaatttgcacgcgctgttccgcctgctgcagttttgcctgcccctgacgcgccagttgtacgccgcgctcgaattcattcagcgcgtcttccagcggcaaatcgccgctttccaggcgggtaacaatatgttccagctcgctcagcgcagtttcaaagctggcgggcgcctcatttttcttcggcatgatgactgtttgactctctgtaatggcagtacaagtctatggtaacggactcacactgataagcaaataacgcgcaatggtaaggggaaatgcgcaagatgtccgtgatagtgatatacttccgcgcctggatgcagccgtaggtatgggctgctgtactatttctccacgacaagccttagatagcttgctaaagaaccattgccgccatgaagtttatcattaaattgttcccggaaatcactatcaaaagccaatctgtgcgtttgcgctttataaaaattttaaccgggaacatccgtaacgttttaaagcactacgatgagaccctcgcggttgtccgtcactgggataacattgaagttcgcgccaaagatgaaaaccagcgtctggtgattcgcgacgcgctgacccgcatcccggggattcaccatattcttgaagtcgaagatgtgccgttcaccgatatgcacgacattttcgagaaagcgttggcgcagtatcgcgaacagcttgaaggcaaaaccttctgcgtgcgggtaaaacgtcgcggtaagcatgagtttagctccattgaagtggagcgctatgttggcggcggattaaatcagcatattgaatcggcgcgcgtgaagctcactaacccggatgtgacggtgcatctggaagtggaagatgatcgcctgctgctgatcaaagggcgttatgaaggtattggcggtttcccgattggcacccaggaagatgtgctgtcgctgatctccggcggttttgactccggcgtctccagctatatgctgatgcgtcgcggctgtcgcgtacactactgcttctttaaccttggcggcgcggcgcatgaaatcggcgttcgccaggtggcgcattacctgtggaaccgctttggcagctcccatcgcgtgcgttttgtggcgattaacttcgaaccggtggtcggcgagattctggagaaagttgacgacggccagatgggcgtggtgctcaaacgtatgatggtacgcgcggcgtcgaaagtggcggaacgttacggcgtacaggcgctggtgaccggcgaagcgctgggccaggtatccagccagacgctaaccaatttgcgcttgatcgataacgtgtctgacacgctgatcttgcgcccgctgatctcttacgataaagagcacattatcaacctggcgcgccagattggtacggaagattttgcccgtacgatgcctgaatactgtggcgtgatttcaaaaagtccgacggtgaaagccattaaagcgaaaattgaagccgaagaagaaaacttcgacttcagtattctcgataaggtggtagaagaagcgaacaacgtcgatattcgtgaaatcgcccagcagacccagcaggaggtggtggaagtagaaaccgtgagcggtttcggcccgaacgacgtgattctggatatccgttctgtggatgaacaggatgacaagccgctgaaagtggaaggtgtggacgtcgtttcgctgcctttctacaagctgagcactaaatttggcgatctcgatcagagtaaaacctggctgctatggtgcgaacgtggcgtaatgagtcgcctgcaggcgctctatctgcgcgagcaggggtttgccaatgtgaaggtgtatcgtccgtaattcctttgccgggtggcggctatgtcctacccggcctatcgttttatttctgccccaaccgttttgcaatgcgctccagcttcatcatcagcagcagcgtaatggccaccagcacaatggtcagcgccgcgccgtcggcgatatttccacggtcggtcaagctaaagatagccaccggcagcgtcgtccagcccggcggataaatcatcatcgtcgcgcccaactcccccatggagagcgataaactcagcgccagcgctgacatcatccacggcatcaataacggcaacgtcacgtgacgcagacgataccagggcgatgcccccagactcgacgcgacgttttcaatatcggcggaaattcgcgccagtccggtcgacacgttactgaaggtaaaggcggaaatcagcacaaagtgcgctgtcagcacaatccatagggtgccgttcatttgcaatggcccctggctgaaagcaaccagaatgcccaggcccacggacactgacggaatcgcactcggcagatagaacaccatacttaaccatttctgcgttttcaccccatattgacgcagcgccagcgccgcccaaacgccgcaaagcagcgcaaacaggctggcgcaaaagccaatcgtgaggctggcaagtagggcatcccatgccgcaccgtgcagagcgttaacaaagtggttcagcgtgaagccactcggcagaataccgttccactgctggctaaggctggacatcagaatcaccgccagcggcaggaaaaagaacacgataaacagtacgctagccacaacgcccgccgctgcgcgtcctttaggtgaccaaattagcatggctagctccttacgccggtacgcgatgccgccaggcgatagagggagaacagccccagcgacaagacaatgttaatcaacgcaatcatgcaggcgaccgtatagtcggactccagaatcgctttgctgtaaaccatcatcggcagggtgttaacccctttcgcgccaataaacagtacgatgccgaactcgttagtggtcaacagcaggcacaggctgccaccagccatcagcgccggtagcgcagccgggaaaatcacctgcccaatcacccgtaacgggtgcgcccccagaatactggctgcctctagctggcttttatcaatttgccgcagcgcggccatcagtggccgcatcaccagcggagtgaacaccgtgatctccgccagaatgacgccctgcatcgagtagagaaaatccaccggcggtagctcaaaggcaaacaggctcatcagcgtaccgttgagcagacccgctgacccataaataaaggtgaacgccagcgtaatcaggaaggtcggcagcgcaataaaagtatcgacgacccgaccaatcaactcgctgccggggaaaggaataaacaccagaatcagcgacatcacgctgcccagcagcaggcaaccggcggtggcgaaaaaggcgatttgcaacgtgttcagcaacgcgccgacaaagcgtttcgagtcgaccacctggcggaaggtctcgagcccgatctcgccattggcaccgcgtagcgcctgttcaacgatgagcgacagaggccagaaaaacagcgtcgccagcaccagcaacgggagcagcagccacagcagcgggcgtaggttaagcgccggtttttccagaggtaaaatgagtgacatggttatacctcaatcaggaccgcatcatccggttcgaaccacagcgccagcttgtcgcccacgcgcggcagcggattgacatgcgtcaacaccatccgcaccgtttcgccagcaacgtcacacagcagatgggttaaatcgccctgccagtgcaccgattgcagtgtggcgttgaagcggttgctgtaggccgaacgcggcgtcaggctgaggtgctgaggacgaatgcacagcagtttgttgtaaccgtggtggctgccccggctgaacgcgcgaatcaccgcaccgccgcagctgacgtccaccagccccggagcctccgttatccccagcgcgatggcggagagaatattggcgcgacctaagaattcggcggcaaaacgattgggcggatgctgatatagcgcgcgggtttcgccgtgagcaatcagcgagccatccttcataatgccgattttatcggccagagtgagcgcttccgtttgatcgtgggtgacgtagagaatagtgagttccggcagctcacggtgaagacgggcgatttcttccaccatattatgacgaatctgtgcgtccagcgctgacagtggttcatccagcaacagcacgcgcgggcgcacggcaatcgcgcgggcgatggccacgcgttgctgctggccgccggaaagttgatgcggataacgggcggcgtaatcactcatgccaaccgttttcagcgcctgcgttacacgctcattaattagcgcctttggctgcttctgcgcacgcaggccaaaagcgacgttgtcttccactttcagatgcgggaacaaggcgtagttctgcaccaccatcgccaacccgcgtttatagggtggcagatgggtgacgtccgtatcgccaatcagaatacgaccgcctgcaggttgcacaaagcccgcaaccgcacgcagcaccgtcgtttttccagatcctgatgggccaatcagcgccagcacttcgccaggttcaatcgtcaaagagagcggtttaagcaccacgttgccgtgatacgcaacgcgcagcgagtcgaggactatccccgatgtcccctgcgatgcaggggcgtgaacggtggtcgttttcatcagcatcaggcttactcgctttcggtcactttgtgccaacggctaatatctgccgacagcgaaacggctacgtcatcccaatttggctgccagctctgcacgccttctaacgcggcagtggcggccttataatgttcgtcgctcggcgtcacgtcgctgcgtaccggcattccccaggagagttcgctgacgcgagtctgcgcttctttactcagcaggaagttaatcagctttttaccattttcactctgcggcgccccctggaccaggccaatgacataagggatggccagcgcgctgcgctcgcctttgtcgttggccggccagaagattttcacgttcgggttacgttccatctgcgcgaggttcatttgcaggtcgccgttagcgacgtagatttcacctttattaaccagcgcggttagcttgccggtagaggcagatggcccgacgttattggcctgcagcttgccgagatacgcaaaaccggcatctttactgccgaagctgtggaaagcctgcagcatcaccgccgtgccgtcagcggcctgacctggcgtggaatactggagtttatttttgaatttaccgtcaagcagatcctgccagctcgccggggcagttttcagaagcttgctgttgtagataaagctcagatagttctttaccagcggcgaataaaggttgttggcatcggggatagccgatgcggtgtcggtgttaaagttcgccagcagcttttcggcggcggcgcgctgaatgaatggcggcgcggttaccagcacgtcggcctgtggattcgtgcgctcttttgccagacgttccactaccacgccaccaccgccttcaacatagcgtacggtaatgccggtcgctttggtgaatgcgtcaaactgtacctggtaccagctgttatcgccatcatgcagcccgtcgatggagtacaccgtgaccaccgattccgcccatgacggggcgctggcgagagcgaagacagacagcagagcaagtcgggaaagtttcatcgtaatagcctcatagcgtacgttgcattttctggcctataccaggtttgctttttacgctaaacggcttatatgacaaaacgatgaaagagaaataaatcagtccacgccggatgatgctgcgcttatccggatagccgtgagacgatacgattggtaggccggataagtcccgcagccaacatccggcgcatccgctagtgggtatctacctcaatacgcaggctgtcgtgacgccagtattcgatatccagatccagcactcgcccgtgttgatcgtagttcagacggcgcagcaacagcgccgggcgcccttccataacgcccagcgcctgtgcggcctgcgcaggcatggcggtggggtagaacgacagatgcatgctggtatagacgaggttgtagtgcgactcgtatacctcggtcaggctgccgttgagatcgtactgcagcagctcaggcacgcgggcgggcaaacaatggttttcgcagtagcacacggcgcggccatcggcgtaacgcagacgggtcagcagatagatttgatcaaacggctggagctggaggggctccatgacctcgacaggcacggtggttaacacgccgctcagtagcgcggtttttggctcccgcccctgctcgcggcaaagcttatggaagttggtgttctgggtcggatccagccacaggcgttccggcgtaacgaaccaaccgcgacgatcggcgcgccagataagcccactggactccagctgtgccagactttcgcgaatagtaatgcgcgtggtgttgaagatcgcgcacagttcgcgttcagacggcagtttatcaccgcttttcaacgcaccgctctgaatacgcgcctgaagctgcgccttgatcaacaggtactgcgggatatcgcccgggatagatttcatgcttactcgcttccgttttgcctgccgccattatacaagcagagatgaattttttgttgcagcgcgattttctctttgacccgtcgcggcaaagatcgtcatgataaatgcaatctggtatagaccaaaggtaaataacatgacttcgcgtaactatctgttgctgactcctggcccgctcaccacctctcgcaccgtgaaagaagcgatgttgttcgatagctgtacctgggatgatgattacaatatcggcgtggtagaacagatccgccagcagctgaccgcactggcaacggcctccgaaggctacacctccgtactgctgcaaggcagcggcagctatgctgtggaagccgtactgggcagcgcattggggccgcaggataaggtgctgatcgtcagcaacggtgcatacggcgcacgaatggtcgagatggccggccttatgggaatcgcccatcacgcttacgactgcggcgaagttgcgcgcccggatgtgcaggcgatcgacgcgatcctcaacgccgacccgacgatcagccatatcgccatggtgcatagcgaaacgaccaccgggatgctcaaccccattgatgaggtgggcgctctggcgcatcgctatggcaaaacctacatcgttgacgccatgagcagcttcggcggcatccccatggatattgcagcattacacatcgactatctgatcagctccgccaataaatgcattcagggcgtgccgggttttgcctttgtgattgcccgcgagcaaaaactggccgcgtgcaaagggcattcccgctcgctgtcgttagatctctacgcccagtggcgctgcatggaggataaccacggcaaatggcgttttacttcgcccacacataccgtcctggcgtttgcacaggcgctgaaagagctggcgaaagaaggtggcgtagcggcacgtcatcaacgctatcagcaaaatcagcgcagcctggtggccggaatgcgggcgctgggctttaacacgctgctggatgacgaacttcattcgcccattatcaccgccttttattcaccggaagacccgcagtatcgctttagcgaattttatcgccgcctcaaagagcagggctttgttatctatcctggcaaagtgtcgcaaagcgactgcttccgcatcggcaatattggcgaagtatatgccgccgatatcacggccctgctgaccgccattcgtaccgccatgtactggacgaaataaggaaccatgatgaaccgtattcacgctgttattctcgactgggcgggcaccaccgtcgattttggctccttcgcgccgacgcaaattttcgttgaggcgttccgtcaggcatttgatgtggagatcaccctcgctgaagcacgcgtgccaatggggctgggtaaatggcaacacattgaagcgctgggaaaattacctgctgttgacgcgcgctggcaggcaaagtttggccgctccatgagcgcagcagatattgatgccatctacgccgctttcatgccgttacagattgctaaagttgtcgatttttcttctcctattgccggagttatcgacacgatcgcggcgctacgagccgagggtatcaagataggctcctgctccggttacccacgagcggtgatggagcgcctggtccccgccgccgccgggcatggctatcgtccggatcattgggtggcaacggacgacctggccgcgggtggtcgcccggggccgtggatggcgctgcaaaacgtgattgcgctgggcattgatgcggtcgcgcactgtgtgaaggtagatgatgccgcgccgggcattagcgaggggcttaacgcggggatgtggacggtggggctggcggtatcgggtaacgaattcggcgcaacatgggacgcctatcagacaatgtcgaaagaggacgttgcggtccgccgcgagcacgcggccagcaagctgtacgccgccggggcgcattacgtggtggattcactggcggatttacctggggtgattgcgcatattaatgcgcgtctggcgcagggcgaacgcccgtaaaataactgccggatggcgctgtcgcttattcggcctacagactgtaccgttttgtaggccggataaggtgtttacgccgccatccggcaatcattcttattcgtagtagttataaatccccgccgccatcaccagttgcgaagccacttcatgcgctttttcacgaccagccaacaggtcgatgattttcaaaccaaaatcgatagcggtacccggtccctggctggttaataattttacccgcgcatcccacaccacacgcttatccagccactgttcggcggggatcttatctttcagcgccggaaaaccggtcatattgccgatagggaagatatcgtgcggcacgagcactgtggcggctgcggcgcaaatggctgcgacaatgcgcccggagcggtgaaactgttttacggtttcgaccagcagcgggctgtcgcgaaagcactcggcgcctttaattccgccgggcaacacgatgatgtcataatcgccgtcggcaacttcaaccagcggcgcatccgccagtagctttacaccgcgcgagcagacaatcgtcaggttgccatcgctggcgacgctggcggtagtgacgtggattccgccgcgaaccagcagatcgatagtggtgaccgcttcggtctcttcactaccaggggcgaggcataccagtgcctgagcgctcatactcactctcctttcgctttaccatttcaaacaggcggctattttccggaacggcgagaccgtgcacgcgggcgcgcttgagtaaataaccggtgatgtagtcaatttcggtatggcgcatggcacgcacgtcctgcaacatggatgagatgttttctgccgtactgtcaatcacttgctcaacataatagcgtaaatcgtctgccgatgtgtggtagccttcacgttcaatcacggcggcgacctcttcgcaaatcgcgttgatttcatcagtatgatggcgcagctcgccgttcgggcagttccaaagcgcggtgagcgggttgataacacagttgaccgccagtttgcgccacatctctgcgcggatattgttatgccaggcgacatcgggcagtaccccctgcaggatatcggcgagataactgtaatcgccgtcttgctcgcgcgccgggccaatatgcgtagtaccgttagcgacatgaataatgatattaccgtcgcggcgcgcagcatgggtgatagtccccatcaacatcggctgttggatattttgcagttcttctatggttcccattccattatgaatgagcaggataggcgacgtcaccggtagggttgacgccagggttcgtactgcgtcggaaacctgccacgctttcagcgtgactaataacagttcgctcttcgccaaaaaatccggatcgtttgccgtcagtgattcgttgaaaaaggaaccatcggtatcgatcagatttacgctgcaataaggttgtggcacccgtagccagccctgtacgtcatgtccgtgtttgcacagtgccgaaagccaaagttgtcctaaggctccgcatcccagtacagtaattttcattgttcctcctcacctgcaacagcgccaggtgttatggcgctaattatagcgtcatcagctaagcttctcgttaagcctcgttgcaggtattatgcaacgcaacgaaaatgaagggagaagaaaagatgccatctttcgatattgtttctgaagttgatctgcaggaagcgcgtaacggtgtggataacgcggttcgcgaggttgagtctcgttttgacttccgtggcgtagaggcgactattgaactgaacgatgccaataaaaccatcaaggtgctgagcgagtccgatttccaggtcaatcagttgctcgatattctgcgcgccaagctgcttaaacgcggtattgaaggcgcttcgctggatgtaccggacgagttcgtgcatagcggtaaaacctggtatgtggaagcgaagctgaagcagggcattgaaagcgccgtgcagaagaaaatcgtcaagctgattaaagacagcaaactgaaggtgcaggcgcaaattcagggggaagagattcgcgtgacgggcaaatcacgtgacgatctgcaatcggtaatggcgctggttcgcggcggcgatttgggccagccgttccagttcaaaaacttccgcgattaagttgttatgccggatagagcctcgccgccatccggcaatgcagtattcatcctttgctgataagctgttcaacttcaaagcgattggtcactttgctgtcgattttgacgtaagcggaatgctcttccgccacgatcagcgcttcgcttacgcctttcattgccaacagtcgctgttttagcctgtcgtcagcaacgatatccgctggaatttccacacgcaggctgctgacatagggcggctctttcatggtacttgccactgccagccataccatcgccagtacggccccggcaaggaaaacggtttgcccatcaaacgtgccgtctatccagccgcccagcgagccgccaagcgccacgccaagaaactgactggtagaatagacgcccatcgccgttcctttataccccgcgggcgactctttgctaataagcgaaggcagcagcgcctccatcagattaaaggcgaggaaaaagagttgtacgccaatcaccagctcccagaaatgctggcccgctccccacaacacgatttctgcgacgacaatgagccccacgcagaacaggaatacctgcttcatccgccgtttgacttcagcatagataataaaaggcacgacggcggcaaaggcgatcaccatggttgccagatacaccttccagtgttcggcggcagggaaaccggcatcggcaagctggccgggcagggcgacaaaggtggacatcaataaaatatgcagacacataatgccgaaattgagtttgagcagcctcggctccgccagcactttactgaagctgcctttgaccatcccggattcgcgattcagcacatggttggtactgttgggaaccacccagatcgtcagaagaatgcccagagtggcgagggcggcgatcatccagaacaacgcgttcaatcccagactatgggtaacgatcggccctaataccatcgcaatcgcgaaggtgataccaaagctgacgccgataaacgccatcgctttggtacggttttgctcgcgggtgaggtcagacaggagcgccatgacggcggcggcaatagcgccggacccctgtagcgctcgccccagaataatgccccagattgagtgggagagcgcggcaatgacgctgcccgcgacaaataccgccagtccgccgacaatcagcggtttgcggccaatgcggtcggacagcagcccaaagggaatttgaaagatagcctgcgccagcccgtaaatgccgatcgcaatgccgattaatgcttcgctggcgccctgtagcgccataccgtatgtggtcagtactggtagaaccataaacatgcccagcatacgcaacgaaaagacggtccctaaaccccatgtggcgcgcagctcccctggcgtcattttataatcgttcattgccacctctgtataaaagctgggagtagtgtagtgcggggagtgtgccgggtaaatagagggttaattagcaaatattatgtttttgaaacagttgagctaaaaaagagataaattgttaacacgataggggcgatcgggagagtcagcatagccttgtgctcattcatattccgatctccttgagctgtagtggctatctgagccatctcagtatagtgtagcggttagccacggccttcaggctgtgtgcgctgttgctccatgttgcaatagcagaactcgtcaagccagactgtcagcgaaccgcgctgcctgagtgtggctggccggtgggtgattttaaacttttgctttgccataggaacccgattctgaaacgatggcaatgatcagatccgcccatcttctgaaaatttgatttattcaacaacgccgagactgatagcaaactttctgcgtgatggcgcgcgtttatcaggcagaagattcgtcagcagtcgcatttattatattattcaaggagtgaattcgttatggaaattaaatttttatcattatgtattttagcgggtgttttatttgttagccaggtgaatgcttcagcgaacaacggtaaagatgatgtaaaatatgctgcgcttacccagaaggatcttgatgctttgcctgtggaaaaaagagcttcggttctggatgaactggggtttatccatgaatacggccttagtgtaccgatgaatcgcgaacgggcgttgcagtattacaagcaggcctgtgagcttggcggtaactacggctgttataatgtgaagtatgcttatcagtatggcgacggagtggcgaaagatagcgctcaggccaataagtatgctaagaaaatgaatctggataatttattgattgagcaagaatatattgataagttttcgcaagaaatttacatggcaaaagcattggccgatacggataaatcgcagcgggcggcatttattagtatactaattcatgctctaaataatagacccgagagcgatgcgcttttttttagccgtattggatttaaccaggaaaaaacatttcggctggctacgttatggtcgcaggatggcgacccgcaaatggattatcagatggggcgactcacccttaatgacttttccggtcgctatgcggacgagccttatcaagccagacctgcgtcattgaagtggtttcgcgccgccgcggaaaaaggcgtcgttgaggcccaatctctcttggggggtatttattcggggggagagggcgatgagtgggggattaagccagacattcaggaagcacaaaaatggtatggacaggcggctaagcagggggacagcgatgcacagattgcgttaggtaaaatctattattctggcgcaacagggcgcactgattacgctaaagcgctggcattatttacgcaggttgaaaatgatggtactaattcgcgctcaacgatgccgttgagttggatgtattataacggtttaggtactgcacctgattgtgataaagcctggtcgtattacaagaaagcatctcgatatgtaggtaagaaagttgaggaaaaaatatttttaagtaaatgcgcagcggatattcagagtcgaaaaaacaatgcggatgctttacctaaagtaaccctgaaaaaagagagaattttctctcgcgggataacggctaaaccgaaagaatgcgcactaatttttcagattggcacagataaaatccgtaacatggcgaatttgcatattacgcttgaactgaagaatgctgatggaatggcaactgaggaaacgttgatgattccgccattcggtttgaatactctggggatagatatgcaaaatcatgatgttgatcctctcgttaccccatacgatctcccgctgtatacgcaagatttttgtcacgggatcggcgatatccattttacgctgaaatccgctacggcaacgattaacggtaagaatgtcgatttactgaaagctgacagtgtgcgctttttagataaagaataagggaatgaaaaatgataaaacggaaatggaatcttttgcttctgcttgggctttctttcgcatcggtatgccaggcaggtgatgatattgacgcgttgtatagccgtattgcgcagaaagatattcaggcgctaaatgagctaaaagcgttagccaaagataataacgcccaagcgctggcagaactggggtttatttatgagtacggcgtttcagtatctgtggatattccgcaagcaataaagtactacgagcaggcttgtgatttggacggtgattatggttgctttaatgcggcttatttctatgaatatggcatcggtacccaaaaggacattacgcaagcgaaaacattagcaaaacagcttagagaaaaaattaatctatccaatatcaatctcgataaaaaggtgagtgaacgtataattgggagtgtttatagtaataaacttgaggcatatagagacctttcatttcgtcctcattttattcaaggcttaagtttctatttttatgccccgcaatcagatgagcgaaaactgctgagtcgaataggttttgactcatcacatcttgcgcggatagcgatactctgggcgagagagggtgatcctgaggtcgcgtatcagacggcaaaactggtctctactttgtattttaataatgaaacgaaaacgatagatattgctgaagcgctgaaatggctccgaatttcggccgagaagggggatgccgactcacagacgctgttaggttttctttatgaacacgccggattgggattacaaccagatggagagaaagcccggaaatggtatgaaatggcggcgcagcaaggtaatggagaagcattgtatacgttaggtcgtatgtactattctggcgtactggttaacgttgattacgataaggcgctgtatttttttaaaaaagcttatgagaaaaaattacaggaggccgctgattatttagcacagatgtattttaatggccagagtgtagatgtcgattgccaacaatcctggcactattacgataacagctatataaaaaagatgacacaacgcgattatcttgattattgtgaaaaagatcgaaagcgccgtaatgattttaatcagcaacttcctgagctgacattagaaaaatatgcgggattatttggcaggattgataatattcctctgtgtcagattggatttgttgtcaatacgaataagttaattcatgttgcgaacttacgtgtggaattgatattaaaaaatgatgctggagttagtgacgaaagaatggtcgcttttcctcctttgggtctcaatactctgggtgctgaacagggtatgggggattcttttaagtcgatgggatatctcttgatgaaaaacggtgacttgtgtgattaccataaacttactttcaccgtgaagtcagcgacggcaacaatcaatggtaaaaaagttgatttactgaaaacggataatttacatattattcagaatcgataactcgtggggcgttactgcctgatgaaatggataaaaaaaccgccgtttgtgacacggcggttttttcaatagcaacgcttgttaccagacgtaagtcagcagattctgcgaattcggcaccataaaatcaacggacatcatgatactcagcgcggtaatcgcaatgatagagaagccgaacagcttgcgcgcccagaccttatcatcttccactttgtaaccgcgtagcgccatgccgagccaccaaacgctgaccgccgcggcgaccaccaggtatttgtaaccggcataaccgcccaacgtgagcattagcgttgcaacggcaaacgcaatgatgtacagcgtgatgtggtttttagcgactgagattccttttaccaccggcagaaccgggatattggccgcctgatagtccttaaagcggaaaatggcgatggcgtaagagtgcggcatctgccagaggctgaaaatagccaacaggatcgccgcgccgctgtcaaagtcgcccgttacggcgcagtagccaatcaccggcggcgctgcgccggagagagaaccaatcagcgttccgtagacggagtgacgcttcatgtacaagctgtacacgccaacgtagaccacgaagcccattacccccagccagcaggccagaggattggcgccaaaccacaacagcataaagccagcaatacccagcagggtggcgtataccagcgagacgccaggagaaatcaggcctttgaccagcacccgattcttggtcctttccatcttcctgtcgatatccctgtcgatgtagttgttaaatacacaacccgacgccacaaccagtgacaccccgaccagcgtataaatgaacaggggatagtcaatgctgccctttgaggccagcagaaatcccccgatcaccgagatcaggttgccaaagatgatgcctggtttcgttacttgcaggtattgcttaaacatcatactcgccgctcttagtgcatcatcatgttgtagttgaggttccacataatccagatggagcccacaaccaggatggcgatgatcagcacggtaaagatgaaggccgtcatgttccagccttcatcagatttggtgttcatgtgcaggaaacacaccagatgcaccaaaatctgcaccactgccattgccaggatagatcccagaataacggccggagaggcagcgccggtcatcaccatccagaatggaataaccgtcaggatgaccgacaggataaagccggtcatgtacgtttttacgctgccgtgggatgcgccgccgctctcggtagaatgactcattacatcgcccccatcagataaacaacagtgaatacgcaaatccaaatcacatccaggaagtgccagaacaggctcagacacatgatgcgggtacggttagtgctggtcagaccgcgacgggcaacttgcaccatcagcaccgccatccagatcaaaccggaagtgacgtgcagaccgtgcgtgccgaccagcgcgaagaacgcagacaggaagccgctgcgatccgggcccataccgttaacaatcaggtgatggaattcatagagttccatcccgataaatccggcaccgaacaagaaggtcaacgccagccaggagataacctggctcttgttgttcttgtgcatagcgatcgccgccatgccgtaggtaatggagctaaataacagcaggaaggtttcaaccagaacgaacggcagttcgaaaatgtccttacctgtcgggccgccagcggtgccgttcaccagaacggcataggtagcaaacagaatagagaacagaatgcagtcgctcatcaggtagacccaaaatccgaagattttgttctggcctgcgtcatggtgcccgtgttcgtgcgcgtgggcagtcgcgtgcgttaaagtatcagttgccatttttcagccctgccttagtaatctcatcgaaatgctggttttccagtttttcgacttccgggaccggcacgtagtaatccacatcttcatcaaagctttttacaatccagctgatgatcatgcctgcgaaacccactatcgccagccaccagatatgccagatcatggcgaagccaaataccgtcgcgaaggcggcgataacaataccggcaccgctatttttcggcatatgaatctcttcatactgtccaggctgttggtacgcttcgcctttttctttcatttcccagaaggcgtcacgttcgtgaacgtgcggcacaacggcaaagttatagaacggcggcggagaagaggttgaccactccagcgtacggccaccccatgggtcgccggtcagatcgcggttctgatcgcggtcgcgaatagaaacgaagatctgaatcagttggcacaggatacccagcgcaatcagcgcggcgccggcggcggcaaccatcagcatcgtatggaactgcggatcaatttgctggctgaggcgacgggtcatgcccatgaagcccagtacgtacagcggcataaaggctacaaagaaaccgataatccagaaccagaaggcgcgtttaccccaggtttcgttcagcttgaagccaaacgccttcggccaccagtaggtcatacctgcgaagcagccaaacaccacgccgccgatgatcacgttatggaagtgcgcaatcaggaacagactgttgtgcaggacgaagtccgcgcccggtaccgccagcagaacgccggtcataccgccgaccgagaaggtcacgataaagccaatggtccacatcattgcggaatggaagacgatacggccctgatacatggtgaacaaccagttgaagatcttcaccccggtcgggatggcgataatcatggtggtgataccgaagaaggcgttaacgttcgcgcccgcgcccatcgtgaagaagtggtgcagccaaacgataaacgacagtacggtaatacagacggtcgcccaaaccagcgaggtatagccgaacagacgtttacgcgagaaggtcgctgcgatttcggagaataccccgaagaccggcagaatcagaatgtacacttccggatggccccaggcccaaatcaggttgatgtacatcatcatgttgccgcccatatcgttggtaaagaaatgggtgcccagatagcgatccagggtcagcaacgcgacggtaaccgtcagaatcgggaaagaggcgatgatcagtacgttggcgcacaaagaggcccaggtaaagaccggcatcttgaacattgtcatacccggcgcacgcatcttcaggatcgtcacgaagaagttgataccggttaacgtcgtaccaatacccgagagttgcaacgcccatatccagtaatcgaccccgacgctaggactgtactctattcccgatagcggcggataagccagccaccctgtctgcgcgaattcacccacgcccagcgagaggttaaccagaataacgccgacaacggtgaaccagaagctcaggttgttcaggaaagggaaagcaacgtcgcgcgcgccgatctgcagcggaaccaccaggttcatcagaccgataacgaagggcatcgccacgaagaagatcatgattacgccgtgagcggtaaagatctgatcgtagtggtgcggcggtagaaaacccgcttcgcctgcggaggcaagcgcctgctggctacgcatcatgatggcatcggcgaaaccacgtaacagcatcacaatcgcgacgatgatatacatgatgccgaggcgtttatggtcaaccgacgttaaccactctttccataggtaggtccacttaccgaagtaagtaatcgctgccagtatcgccagtcccccgacgataattgcagcgatcgttaccatgacgataggttcatggaacggtactgcatccagtgataattttccgaacatcttatcttcctcaacccttggagttggcggattccgcgtggctcatgtccataccttccattccttcatgcgagctgtgctcaccttcaggttgggtcatgtccatgctcttaccgtggcccatgaatttgttaataacgtccttgaacaaatcaggtttcacgctggagaaatattccaccttgttgtactcgcttggcatagccactttctcgaacgccgccatatcattcatggtgttcggagactgcttcgcttttgcgacccattggtcgaattctgcgcggtctttggtggcgatagctttaaacttcataccagagaagcccgggccgctatagctggcggagatgccatcgtaggttccgggttcgttggcgatcagatgcaaacgtgtttgcataccggccatggcataaatctggctacccagacgcgggataaagaaggagttcatcacggagttggaggtcactttgaaataaaccggcgtgttcgccgggaaggcgatctcgttgacggtggcgataccctgctccggatagatgaagaaccatttccagtccatggaaaccacttcgatggtgatcggtttttcgtcatgcgccagcggcttgcttggttcaagcgcgtgcgtggttttccaggtcagtacggcaaggaaaatgatgattaagataggcaccgtccagaccacggcttccactttattggagtgtgaccagttcgggctatacttcgcatccttattactcgcacgatacttccaggcgaaaccaacagccatcaagatggcgggaataacgacgatcaacatcaggccaaatgccgtcagtatcagcgaacgttgctccagtccaatctgtcctttgggatccagcagcgcagaattacagccactgagtaatgcagtgcctgcaattaatgacaaccatcccaaacttttattgtatttcctgagtctcatttaacgacctcaattccacgggacctggtggcgtttaaagtgtaggggcattttacggtaaggttacattactgtaaacatgattggttctgtgttaccaagttctgccgcgcatgtcacatatgttgccaagtatgtcgaaataactttaagacactgttgaaactttgcgttataacggatgaggtctgtaagtgggatgttgagggataattggtataaccaatgtaaaaataaaacaattacttaacaatttattatcaataaaaggacaatcaacggcagaaatttaaatttaatcggctgaatcgtgtaaagaaaataggtagcgtagaaattaccaataatttccaaaattctgttgcgcacaaaaagacaaatatattttttatcaattgatggttatttagccgttataattccgggtcgttattacaacggcaaataatgttttacagcaggcgtgtttttcgtagcgccaggtagtccagcaacccgccaaagacaatgccgcacacggcaaccactaccgcagtctcaagcaattcgggcaggaatgagaagttagtgtaatccaccgcgttcatggtcagcaggagtacccataccgccagcaaagcgacgcccgcgagcaggattgaaagcgcgaaattgtaggcgccacggtattgcgtgcggggaatgaaacgctcgctctgccagctatattccagcgtttgccgacagaccagcaacagtaacagcccgggaacggcggcgacaaccgagaagaggtagaatgtcggccagccgtgcgcttcaacgaaccagcccgctacaggaccaacataaacgcggcctactgcggagagggccgacagtagggcaaactgtgttgcggaaaacgacttattacatagcgtcattaataaggcgacaaaggcggcagtacccatcccgccgcacagattttcgaaaaagaccgccgcgcccatgctgaacatgtttttatcggtaatggagagcaaccagtaaccggcgttggacgcgccttgcaaaatgccgaaaatcagcagcgcgcgaaacagcgaaagacgctgcattaatatgccgccgtataacgcgccgacgatcgttgccaacaggcccagcgttttattgaccacgccaacttcaccagcgtcaaagccgacgccgcgaatcaaaaaggtggtggtcaggctcatagcgaaggcgtcccccagtttataaagcacaatgagcagtaaaatcagccaggcgttattacggccaaagaaatcgcgtagcggcgcgacgacggcctgttccagcgatttcggggacgggatagtatcggtcggttccggcgccagtaaggtggcgataatgcaggggatcaacaatgccgccatcagccagtacatgccctgccagccgagccagcgatcggccagccatagcgccagtccgccggaaaccagcatccccaaccggtagccaagcacgctgattgccgcgccagcgccgcgttcttctgcgggtaaaacatcggttttccaggcgtcgaacacgatatcctgcgaggcggagcaaaaagcaatcaccaccgccagcgccgccatccagcgtagctgcgtgccgggttcaagaaagcccatcgccgcaatcgccgccagtaacaacagttgggtggcgagtaaccaaccgcgacgacgacctaaaaaaggcggcgtgtagcggtccatcagcggggaccagagaaacttaaacacataggcctgaccaaccagcgagaagaagccaatcgttttaagatcgatattctcgacggtcatccacgcctgtagcgtaccggaggtgagcgccagcgggagaccggaggcaaaacccaatatcagcagaatggctgagcgcggttgctggaaaatacgtaaatattgacttgacataggcatctacagacccggcttctgccgggtcttgttgttgctattaacgggcgttttgcttgataaaatcgtgaatactggtgtcctgagacatatcagcaatggtatcggtcagaacgctattcactgcgtcggcaatattctggttagaggcctggaacgccccttcaatagagtagttggcgcgatagtttttggtcatcttgctgccatttgccgcggtcgcaataatcgcgatatccgctttggtcgcgatgttgtagcgcacgctgccctgggaaacatcagcatacagttggttaacaattatctgcagattaaccgcgccgttaggcccgatcatatagccccgcgccgtcatctgtttttccaggacttcttgtaacaggaagcgtaaatcgcgggaggcggttaacgttaccagctggttgttacgcgtgactttcgctaacgcttgatcctggcgttggtccgcgccggtaatgctaacggtgacgcccatcaggctcgggtcctgctgtggcaaggtgatcttcggcgcgacgtcaatggtcgtcggcggtgtggcgcatcctgccagcataaacagagcgactaacggaaagagaagtttttttaacatattcaggctctcaatgacgcttaaaacgtgataggtaaaaattcccgccatcataacaccgctaacggcgaggggaagtggtcaacgcaggtaaattcgtcgtaatgtccgatttggtattgataacggcgcgagcggggattttgagcgctaaaagaatgattaaggcagtaaacttcatacgtttggctgaaataatcagacgaaagctaaatttttgttgtcatgctgtaatggaaacggtaaaagcggctagtatttaaagggatgggtgacatcacagcgttgtcggaggagattttcatgatgatacgtgagcaaatagaagaaaaattaaggacagcgttcgaccccgtgtttctcgaagttgtggatgaaagctatcgtcacaatgttccagcaggatcggaaagccattttaaggtcgtgctggtgagcgatcgctttacaggcgaacgttttcttaatcgtcatcggatgatttacggtacgttaacggcggaactttccacaaccgtacatgcgctggcactgcatacttataccctcaaagagtgggaaggattgcaggatactatcttcgcgtcgcctccttgtcgcggcgcgggaagcatcgcgtagcaaaacggatttgcaactacctccgcttttccagtatgttgctacagaattatgtgaaaacggcctgcgggccgttttgttttgtctgaattttgagcgtgtcgtacagtattcagacaaaaattagccgagaattgtgaaaaccgccgcagcatcgcacaatcaccgttctcgactcacaaaagtgatgccgctataatgcgccgtcttatatatgaacgtcttcgggatgattctgacgacagggaatgtgattgattacgagaacatcccggttccgcgaagcaaatagcacgtgcttgcggagtagagttgaccgagcactgtgattttttgaggtaacaagatgcaagtttcagttgaaaccactcagggccttggccgccgtgtaacgattacaatcgctgctgacagcatcgagaccgctgtaaaaagcgagctggtcaacgtagcgaaaaaagtacgtattgacggcttccgtaaaggcaaagtaccgatgaatatcgtcgctcagcgttatggcgcttctgttcgccaggacgtgctgggcgatctgatgagccgcaacttcgttgacgcgatcatcaaagaaaaaattaacccggcaggcgcgccgaactatgttccgggcgaatacaaagtgggtgaagacttcacttactccgtcgagtttgaagtctatccggaagttgagctgaccggcctcgagtccatcgaagttgaaaagccggttgttgaagtcaccgacgctgacgttgatgtgatgctggacaccctgcgtaagcagcaggcgacctggaaagaaaaagacggcgctgctgatgcggaagaccgcgtgaccatcgacttcaccggctctgtagacggcgaagagttcgaaggcggcaaagcgaccgatttcgttctggcgatgggccagggtcgtatgattccgggctttgaagacggcgttaaaggccacaaagctggcgaagagttcactatcgacgtgaccttcccggaagagtaccacgctgaaaacctgaaaggtaaagcggctaagttcgttatcaacctgaagaaagttgaagaacgcgaactgccggaactgaccgaagaattcatcaaacgtttcggcgttgaagatggttccgtagccggtctgcgcgctgaagtacgtaaaaacatggaacgcgagctgaaaggcgcggtgcgtaaccgcgttaagtctcaggcgatcgaaggtctggtaaaagctaacgacatcgacgtaccgtctgcgctgatcgacagcgaaatcgacgttctgcgtcgtcaggctgcgcagcgttttggtggtaacgagaaacaggctctggagctgccgcgcgaactgttcgaagaacaggctaagcgtcgtgtagttgtcggtctgctgctcggcgaagtcattcgtaccaacgagctgaaagcggacgaagaacgcgttaaaggcctgatcgaagagatggcgtctgcttacgaagatccgaaagaagtgattgagttctacagcaaaaataaagagctgatggacaatatgcgtaacgtcgctctggaagaacaggctgttgaagcggttctggcaaaagcgaaagtgtctgaaaaagccacttccttcaatgagctgatgaaccagcaggcgtaatttttcgcgttaaaagcacgaaatttgcacaaaaacccgtcacctttcagtgacgggttttttttgtcacgtattttgcatggtaagggtgcgaaaaccgcgtttcagtgttagcgttagagcaaaagattgttatgcttgaattatggcgatgccgtacccattacagagggactggctgataatccgtccatcaggttacaatcagtacagcagattttttcaatttttatccaggagacggaaatgtcatacagcggagaacgagataatttggcccctcatatggcgctggtgccgatggtcattgaacagacctcacgcggtgagcgctcttttgatatctattctcgtctacttaaggaacgcgtcatatttctgaccggccaggtcgaagaccatatggctaacctgatcgtggcgcagatgctgttcctggaagcggaaaacccggaaaaagatatctatctgtacattaattctcctggcggcgtaattactgcggggatgtccatctatgacaccatgcagtttattaagccagacgtcagcaccatttgtatgggacaggcggcctctatgggggcgtttctgctgactgccggggcgaaaggcaaacgtttctgcttgccgaactctcgcgtcatgatccaccagccgctgggcggctaccagggccaggcgacggatattgaaattcacgcccgcgaaattttgaaagtaaaagggcgcatgaatgaacttatggcgcatcatacgggtcaatctcttgagcagattgaacgtgatactgagcgcgatcgcttcctctccgcgcctgaagcggtagagtacggtttggttgactcaattttgacccatcgtaattgatgccctggacgcaagtgtgccgctatacacttcatccttcacgctacctcggtgttggctgccagcgcgcctcccagtgacttacttatgtaagcgcctgcagagtcgacgagttgccgccttgatgtagctcgaatgattttgtgtatatactaatgaagggcggcacaacgctgattagcggcttgcgcctgagaatggcatttgcgtcgtcgtgtgcggcacaaagaacaaagaagaggttttgactcatgacagataaacgcaaagatggctcgggcaaattgttgtactgctctttttgcggcaaaagccagcatgaagtgcgcaagctgattgccggtccatccgtgtatatctgcgacgaatgcgtcgatttatgtaacgacattattcgcgaagaaattaaagaagttgctccgcaccgtgaacgtagtgcgctgccgacgccgcatgaaattcgtacccacctggacgattacgttatcggccaggagcaggcgaaaaaagtgctggcggtggcggtctataaccactacaagcgtctgcgtaacggcgataccagcaatggcgtcgagttaggtaaaagcaacattctgctgattggaccgaccggttccggtaaaacgctgctggcggaaacgctggcgcgcttgctggatgtgccgttcactatggcggatgcgaccacgctaaccgaagcgggttacgttggtgaagacgtcgagaatatcattcagaaactgttgcagaaatgcgactacgacgtgcaaaaagcgcagcgtgggattgtctacattgatgaaatcgataagatttcgcgtaaatcagacaatccgtccattacccgcgatgtttccggcgaaggcgtacagcaggcgttgctgaaactgatcgaaggcaccgtcgccgcggttccaccgcagggcggtcgcaaacatccgcagcaggagttcttacaggtagatacctctaagattctgtttatctgcggcggcgcgtttgccggtctggataaagtgatcgctaaccgtgttgaaaccggctccggcattggttttggcgcgacggtgaaagcgaagtccgacaaagccagcgaaggcgagctgttgtcgcaggttgaaccggaagatttgatcaaatttggtctgattcctgagtttatcggtcgtctgccagtggtagcgacgctgaatgaactcagcgaagaagcgctgattcaaatcctgaaagagccgaaaaatgcgctgaccaagcagtatcaggcgctgtttaacctggaaggcgtcgatctggaattccgtgacgaagcgctggacgctatcgccaggaaagcaatggcgcgtaaaaccggcgcccgtggcctgcgttctatcgtcgaagcggcgctgctggataccatgtacgatttgccatctatggaagacgtcgaaaaagtggtgatcgacgagtccgttattgccggtcagagtaagccgttgctgatttacggcaaaccggaagcgcaggcttctggcgaataattaaacattcatacaatcagttagccaaaaaaggggggattttatctcccctttcgtttttcctgtaaacacgccgttgaatgtgtgggaaacatccccatatactgacgtacatgttataggtggtatggagcacagctatactatctgattacctggcggacactaaactaagagagagctctatgaatcctgagcgttctgaacgcattgaaatccccgtattgcccttgcgcgatgtggtggtttatccgcacatggtcatacccttatttgtagggcgggaaaaatctatccgttgtctggaagcggctatggaccatgataaaaaaatcatgctggtcgcccagaaggaagcatcgacggatgagccgggtgtaaacgatcttttcaccgtcgggaccgtggcctctattttgcagatgctgaaactgcctgacggcaccgtaaaagtgctggtcgaggggttacagcgcgcgcgtatttccgcgctgtctgacaacggcgaacatttctccgcgaaggcggagtaccttgattcgccagccattgatgagcgtgaacaagaagtgctggtgcgtaccgctatcagccagttcgaaggctacatcaagctgaacaaaaaaattccgccggaagtgctgacgtcactcaatagcattgacgaccctgcacgtctggctgacaccatcgccgcgcatatgccgctgaaactggcggataaacagtccgtactggagatgtccgacgttaacgaacgtctggaatatctgatggcgatgatggaatctgaaatcgatctgctgcaggttgagaaacgcattcgcaaccgcgtgaaaaagcagatggagaaatcccagcgcgagtactatctgaacgagcaaatgaaagcgattcagaaagagcttggcgagatggacgacgcgccggacgaaaacgaagcgctgaagcgtaagatcgacgcggcgaaaatgccgaaagaggcgaaagagaaagcggaagcggaactgcagaagctgaaaatgatgtctccgatgtcggcggaagcgaccgtggtgcgcggctacatcgactggatggtgcaggtgccgtggaatgcgcgtagcaaggtcaaaaaagacctgcgtcaggcgcaggaaatcctcgatactgaccattatggtctggagcgcgtgaaagaccgcatccttgagtatctcgcggttcaaagccgtgtaaataaaatcaaggggccgatcctgtgtctggtggggccgccgggggtaggtaaaacctcgttgggccagtccatcgctaaagcaacagggcgtaaatacatccgtatggcgctgggcggcgtgcgtgatgaagcggaaatccgcggtcatcgccggacttacattggctctatgccgggtaaactgatccaaaaaatggccaaagtgggggttaaaaacccactgttcctgctcgatgagatcgacaaaatgtcttctgacatgcgcggcgatccggcttccgcactgctggaagtgctggatccggagcagaacgtggcgttcagcgatcattacctggaagtggattacgatctcagcgatgtgatgttcgtcgccacttccaactccatgaacattccggcgccgctgctggatcgtatggaagtgatccgtctgtccggttataccgaagacgagaagctgaatattgctaaacgtcacctgctgccgaagcagatcgagcgtaacgcgctgaagaaaggcgaactgacggtcgacgatagcgcgattatcggtattatccgctattacacgcgtgaagcgggcgtgcgtagtctggagcgtgaaatctccaaactgtgccgcaaagcggttaaacaactgttgctcgataagtcgttaaaacatatcgaaattaacggcgataatctgcacgactacctcggtgtgcagcgctttgattatggccgcgcggatagcgaaaaccgcgtaggtcaggtgacggggctggcgtggacggaagtgggcggcgatctgttgaccatcgaaaccgcctgcgtcccgggcaaaggcaagttgacctacaccggctcgctcggtgaagtgatgcaggaatccattcaggcggcgctgaccgtggtgcgtgcgcgcgcggaaaaactgggtattaatccggacttttacgaaaaacgcgatatccacgttcacgtgccggaaggcgcaacgccgaaagacggtccaagcgccggtatcgcgatgtgtaccgcgctggtttcctgcctgaccggtaatccggtgcgcgcagatgtggcaatgaccggtgagatcacgctgcgtggtcaggtgttgccgatcggcggcctgaaagaaaaactgttggcggcgcatcgcggcgggattaaaacggtcttaattccgttcgaaaataaacgtgacctggaggaaattccggacaacgtgattgccgatctggatattcatcctgtgaagcgcattgaggaagttctgacgcttgctctgcaaaacgaaccgtctggaatgcaggttgtaaccgcaaaatagtgacctcgcgcaaatagcgctaataaaaacagggctggcaggctatttcggacttgccagcctttttttgtatagctaatttagatggttgattgggtctgccaccattaacgggtgttgtaagggcgtggcaggcctgatataactgctgcgcggtcgtacttcgaaggattcaggtgcgatataaattataaagaggaagagaagagtgaataaatctcaactgatcgaaaaaattgctgcaggggctgatatctctaaggctgcggctggacgtgcgttagatgcgattattgcttctgttaccgaatctctgaaagaaggggatgacgttgcactggtaggctttggtacttttgctgttaaagagcgtgctgcccgtactggtcgcaacccgcaaacaggtaaagagatcaccatcgccgctgccaaagtgccgagtttccgtgcaggtaaagcgctgaaagacgcggtaaactaagcgttatcccctcgggggatgtgacaaagtacaagggcgcatcaactgatgtgccttttttattggcgattcgggactttctgtgcgttgcgggctgacaattgccctcgtttcttgtcacaataggcttttgtgcgccgcgttcagaaaatgcgatgcgcgtgaagtctctatacgcaaatcattcaggttgcgtcgacgcggcgactgagcgaatcactcggtagccagcggagaagccgcctgaaagataaagtgtaaagtcacctacagcggagtgtggttacaccatgatggacagcttacgcacggctgcaaacagtctcgtgctcaagattattttcgttatcattatcgtgtcgttcattttgaccggcgttagtggttacctgattggcggaagcaataactacgccgcaaaagtgaatggccaggaaatcagccgggcacagtttgagaatgcgtttaacaacgaacgtaaccgtatgcagcagcagttgggcgacaggtattctgaactggcggccaacgaaggttatatgaaaagcctgcgccagcaggtgctgaatcgtctgatagatgaagcgctgttggatcaatattcccgcgaactgaaactgggcatcagcgatgagcaggtaaagcaggcgattttcgccactcccgcttttcaggtggacggtaagtttgacaacaaccgctataacgcgattgtgaatcagatgggaatgaccgccgatcagtacgctcaggcgctgcgtaaccagcttaccactcagcaactgatcaacggcgtggccggtactgattttatgctgaaaggggaaaccgacgaactggcggcattagtctctcaacagcgcgtggtgcgtgaagccgttattgatgtcaacgcgctggcggcgaagcagcaggtgaccgatcaggaagtgtccagctactacgatcagaataaagtccgctttatgacgccggaacagttccgcgtaagctatatcaagctggatgccgcgacgatgcaggcaccggtcagcgatgcggatattcaggcctattatgaccagcatgtagatcagtttactcagccggagcgtattcgttacagcattattcagaccaaaacggaagatgatgcgaaagcggtactggatgcgctgaacaagggcgaagatttcgccacgctggcgaaagagaaatctaccgatatcatctctgcgcgtaatggcggcgatatgggctggctggaagagtctgccacggtgccggaactgaaaaacgccggattaaaagaaaaaggccagatatctggcgtgattaagtcgtctgtcggttttctggtggcgcgtctggatgatattcagcctgccaaagtgaaaccgttaagcgaggttcgcgacgacattgccgcgaaagtgaaacaagaaaaagcgctggatgcttactatgcgttgcagcagaaagtgagcgatgcggcaagcaacgacaatgagtcgttagcaggcgctgaacaggtcgctggcgtaaaagccgttgaaaccggctggtttagccgtgacaccttaccggaagagctgaacttcaaaccggtagccgatgctatctttaatggcggtctggtgggcgaaaacggtacgccggggccgaattcagacattatcaccgtggatggtgaccgggcttttgtcgtacgcgtgagcgaacataaacctgaagccgtgaagccgttggcagaagtgaaagaacaggtcactgccctggtgaagcataataaagcggaacaacaggcgaagctggatgcggaaaaactgctggtcgagctgaaagcgggcaaaggcgcggaagcgatgaaagcggcggggctgagttttggcgagcctaaaacgttaagtcgtaccagtcaggatccggtgagtcaggcggcctttgcgttaagccttccgacgaaagataagccagtttatggcgtggcgaacgatatgcagggtaacgtcgttctgctggcgtttgacgaggtgaaagcgggcgccatgccggaagcgcagaaaaaagcgatggtgcagggcatcacgcagaacaatgcgcaaattgtctttgaggcgctgatgagcaatctgcgtaaagaggcgaaaatcaaaatcggcgacgctctggaacagcagtaatcgtcgaggcgcttcgcaaaaaattgcaaaacgttgtatcccacaaaggccgctttcgcggccttttccatttctgagaattgccgtttgttcgtttttctccgccccgctatcgtggctgcactgttaacaaacaaggagaaaacagtatgaaacacggaattaaagcactgcttattacgctttctttaacctgcgcgggcatggcccatagcgcgctggcggcgacgcctgtcgcaaaaaatgcagcggtggaaacaaaagcggatacgccttcttcatcctccgccaaagcggcattacctgctaaagccagcgatgatgaaggtaccagggtgagcattaataccgcgtctgcggaggatctggcgcgggtgatgaacggcgttgggctgaaaaaagcgcaggctattgtgagctatcgggaggagtatggtccttttaaaacggtggatgatttaaagcaggtgccgggaatgggaagcgcgctggtggagcgtaatctggcagttttaacattgtaatcacttgcacagtggccaaaatttgccagactgtagaggtcataccagttatgacctctgtacttgtcgtttacttataacaacaacgtaaggttattgcgctatgcaaacacaaatcaaagttcgtggatatcatcttgatgtttatcaacatgttaataatgcccgctatctggagtttctggaagaagcccgttgggatggtctggaaaacagcgacagctttcagtggatgacggcccgcaatattgcctttgtggtggtaaacatcaatataaattaccgtcgcccggcggtattgagcgatctattgaccgtgaccagccaggtacaacagcttaacggtaaaagcggcgtattaagccagacgattacgctggagccagaagggcaggtggtggccgatgcgctcatcacgtttgtttgtattgatttaaaaacgcaaaaagcgctgccgctggaaggcgaattgcgtgaaaagctggaacagatggtgcaataacgcttcgcagtctgatggcgttgaacttgtccggcctggagatattgaccatggtgaatatctccaggccggataaggtgcgtgcgccgccatccggcaaaacaatcaccttaacccggttttttgcttcattgctgccatcaccgccgctttattcgacagataatgattcaggccgttagcgcgcagattacaggctgcgcaatgaccacagccatcgcctttaatgccgttatagcaggtcagcgtctcttcgcgaaccaaatccagttggccccaataatcggccagcgcccaggtttcagctttatcaatccacattaagggcgtttcgaaacggatatctttcgccatgcccagattcaccgcgtgattcagcgctttgacgaactcatcgcgacagtctggatagccggaaaaatcggtctcgcaaacgccagtgatcaccgcttcggctttaacctgataagcgtaaatcgccgccagcgtcagaaagagaatattgcgtcccggtacgaaagtattggggataccgtcagcgttcggttcatagtccggcaccggaatgctatcccgcgtcaggctgctgaccgccagttcgttcagcaaagtgacatccagcactttatgcgcgcgtgcgccaagttttaacgccagcgcccgcgcgacatcaatctctgcgcggtggcgctgaccataatcaaacgtgacacaatgcacttcatcatactgatgccgcgcttgcgccagacaagtggtggagtcctgacctccactaaatacaacaacggcgcgtttcatagttatcctgatcaatgacgaaagccaatatggtaacgcgtacggataatcccgaccagcttcttcacggcgaaggcggcggaagccaggcttcgctaaattcaaaccagccgcgaggggtgagtcgaacgccgttaacgcccggtggggcgctgatgcgatagtgataattaaatagtggcgtaagtgtggcgtcatccatcaggttagcaaaaacttgttgtagcgcggcgcggcgatctttttcattgggctgaatttgcagagcgtcaagcgtagcctgcagatgggaaaacgcaggcgcgtccaggacatgtgaccagatctgatcgcaacgtagccactgctccagcgtatattccggcgcttcgccgatcagcctgtcgcccatcatcagatccgcttgcgccaacgcagggcagttatcccagtttttggcattatgaaaaatcaacgttaactcacagccgagcgtcgccaggtaatgtcgaagctgttccgccatcgtatgcagctctacgggaaggtgatacgccagggtaagttttttcggcaatggcgtttcatcaacgtcctgccattgcgggattgtccagccgggtagcagcccctgacttggcataatcaagttctcatctaccggtaaggttttcagcagcgaagtatgatggataatatgtatcagacgccgcgcctgctgtacgttgagccgtgagccctttttgagggttaaataacaaaagccaagactgataccactacttacctgactcagcgtcgccagctcttccggtttgccgatggcaatctgcaccggatggcggcaactggtgcccagatcctgggcaaacagttgcggggtgatccagaattcaatcgctttcagcagcggatggctgaggtgataatggtcatgactttccagacgcaccagttccggcgtgaacaacgccaggcgaaaaggaccggtgccgataagcggcaggtcaggatgcgccagaccgctacaatagctcgccagacgatgcgccagccagtaatcaggtcggtgaaggagaaaggtcaggcactgaggatgcgttacttcgatccgtgcgacgctaataaacaatttgcttagcgcgggtagggtaagcagcctttccaggcgttcgtgtagctgcgcggtatccaccgcatcgccattatgccagtgcagcgtggagcgaatataaaaatcccagcgtaaaccgtcggcggaaacctcccagtgatgcgccaaatccccgcaaggatattgactgtcgcggtcgaagcgcgttaacccggaaaaaacttgccctgcgagatgctgttccgcgcggcctggcaggaaacccggctgcagcggatcaagcggacgatagtagggaatacgcaatgtcggcgtatcgttttgccattggccgcccataaaaggctggagcatcgcccgtaactcgcccggcgccagctgcgccagttccagtacgttgagctgctgccctttttccagcgcctgttccatcatggcggtgcggagcgattccggcgtgaccagaaactggagccgtccacgtttcccgcgcccggactgcgcctcccatcttagccaacctgcctgctgggcctgacgcagcagcgttcgcagatggcgctcgctacaaaaacagcgttcggccagttcgctaacggtgacatgttgcgtttccccggcggaaggctgccagaggcgttgatattgattaagccgattcagtagcctcatagaaacccggaacacttccttttatctgttcactattacttccgtatatctcaggtaatactgaacaacaagttaaccgcgtcacagtgtggagaaagagatggcccgtctggcagcatttgatatggatggcacgttattaatgcccgatcaccatttgggtagagaaacgatcgccacgctggcgcgtctgcgcgaacgcgatatcaccctgacattcgctacgggtcgtcatgtgctggaaatgcggcatattctggggacgctttcactggatgcttatcttattaccggtaacgggacgcgaattcactcgctggaaggcgacgtgctgcatcgtcaggatctcgatcctcaggttgccgatacggtgatgcaccatgcctgggatacccgagccagtatgcatgtgtttaatgacaacggctggtttacaggccaggagatccccgcgctactccaggcgcacgtctacagcggctttcgttatcaggttatcgatataaaaagcattccggcccatcaggtgacgaagatctgtttttgcggcgatcatgacgatctgatccgtttgcgcattcagctcaatgaggcgctggaagaacgcgcgcacctctgtttctctgccgtcgactgcctggaagtgctaccgctggggtgcaataaaggatcggcgctggcggtattgagcaaccatttagggctttcactggcagattgcatggcgtttggcgacgcgatgaacgatcgggaaatgctgggcagcgtcgggcgggggctcattatgggcaatgccatgccgcagcttatcgccgcgctgccacacctttcggttatcggacattgtggtaatcaagcggtatcacactttttgacgcattggctggacaatccgcatctaccttattcccccgaatgagagatctcttccagcaagccagacattcagtctggcttttttttggtttctagtcgccggtaagtaattttgcgatggccgctgaccacggcgtcaaatcgccgatatggtcgctaacccaggccggatggtaataggtatccagatagcgatcgccgctatcgcacaataacgtcacgatagcgccggtttctccagcctcgcgcatccgggccgcaagctgcagagctccccacatattcgtgccggtagaggcgccgactttacggcctagctgcgtttccagccagtgtgcggtggcaacgctggcggcgtccggcacgcgcagcatctcatccacgacatccggaataaaagaaggctctactcgcggacgaccaattccttcaattttactgcctaccgggctgcgtaatgaagcgtcgcgatcctgccagtaaggtaaaaagacggaattttccggatccaccaccatgagctgagtatcatagccctggcagcgaatatagcgcccaatcgtcgcagaggttccgcccgttccggcgctcatgacgataaatcgcggtaccggatggagttcgttgcgcatctggcggaaaatactgtcggcaatattattgttgccccgccagtcggtagctcgttctgcgtaggtaaactggtccatatagtgaccgttcagttcatgcgccagccgctcggaggcggcataaatttcgcaggcgctctccacaaaatgacagtggccgccgtaaaattgaatctgttcgattttacgttttgcggtacaggcgggcatgacggcgatgaacggcagtcccagtaaacgcgcgaaccaggcttcggaaatcgccgttgagcctgatgacgcttcaataatcggagtgccttctttaatccagccattgcacaacccataaaggaacagcgagcgcgccagacgatgcttgaggctaccggtgggatgcgtgctttcgtctttcaggtaaagctggatacctggaaatgccgacaggggcaaacgaataagatgcgtatccgccgagcgctggtggtcagcgttaatttcattaatggcatttttaacccaattgctactcatcattaatatccatttatcattttgtgccaagagtagcgaaaagtacggaaaaaattgttgctatttgacctttaaattacaatgtaaggagaaaaatattctctatggagtgggtatgttagataaaattgaccgtaagctgctttgcttattgcagcaggattgtaccctctctttgcaggcgctggcggatgccgttaatctgacgacaacgccttgctggaagcggcttaaacgcctggaagatgacggtatcctgcttggcagggtcgcgctgctggacccggaaaaactggggctgggattaaccgctttcgtgttgataaaaacgcagcaccacagcagtgaatggtactgtcggttcgtgaccgtcgtctctgagatgccggaagtgcttggcttctggcggatggcgggggaatacgactatctgatgcgagttcaggtggccgacatgaagcggtatgacgacttctataaacgtctggtcaatagcgtcccaggactgtcaggcgtcacctccagttttgcgatggaacagattaagtacaccacctctctgcccattgaataattctcccggtattgccggaaatcatatcaggaaataacgcgtgcgattatttgctcaattaagctggtactttcgccgggaatggcgtcgctatcttggcgcagtggccctgcttatgcttattgcgatgctacagctaatcccgcccaaagtggtggggattgtcgtggatggcgtaaccgcacagcagtttactccaggccgaatagcgatgtggattggcaccattgccctgatcgccgtagtggtctatttgttgcgctatgtctggcgcgtgctgctatttggcgcctcttatcaattagccgttgaactgcgtgaagattattatcgccagttgagtcgtcagcatcctgaattttatcagcgccatcggacgggcgatcttatcgcgcgtgcgacgaatgatgtggatcgcgtcgtatttgcagcgggcgagggcgttctgacgctggttgactcgctggtaatgggctgtgcggtactgattgtcatgtcgacgcaaattagctggcagctaacgctattagcgctgttgccgatgccgattatggcgctgatgatcaaacgttacggcgatcggctgcatgattatttcaaactggcgcaggccgccttctccagcctgaacgaccgcacgcaggagagtctgaccagcatccgcatgatcaaagcgtttggtctggaggaccgccagtcttcgctgtttgcggcggatgccgaagataccggcaagaaaaatatgcgcgtggcgcgtattgacgcgcgttttgatccaaccatttacatcgccattggcatggcgaacctgctcgcgattagcggcggaagctggatggtggttaacggcagcctgacgctgggcgaactcaccagctttatgatgtatctggggttgatgatttggccgatgctggcgctggcctggatgtttaatatcgtggagcggggtagcgccgcatacagccgcatccgcgccatgctggcggaagcgccggtagttaaggatggcgaagagccggtcccggcggggcgcggcgaactgacggcggccattcgtgagttttgctatccgcaaacgacgcatccggcgctggagaatgtgaactttcgtcttaaaccgggtcagatgctggggatatgcggtccgaccggcgcggggaaaagcacaatattgtcgcttatccagcgccattttgatgtgacgcagggagagatccgattccatgacatgccgttgacgcatctgcaactggatagctggcgtagccgactggcggttgtcagccagacgccgtttttgttctcggactctattgcgaataatattgcgctcggacgcccggaggcgactcaggaggagattgaacaggtggcgcgtttagccagcgtacatgaggatattctccgcttgcctcagggctacgacacgcaggtaggtgaacgtggcgtcatgttatcgggagggcaaaaacagcgtatctcgattgccagagcgctactgttaaatgcggaaattctgcttctcgatgatgcgctttctgcagtagatggccgcacggagcatcagattttgcataatttgcgccagtggggcgaagggcgtacggtcatcatcagcgcgcatcgtttatccgcgctgaccgacgccaatgaaattatcgttatgcaacatggtcatgttgttcagcgcggcgatcacgatcaactggcgcagcagattggctggtatcgcgatatgtatcgctatcagcaactggaggccgcgctggatgacgcgccggaacgcggcgaggaggcggtgaatgcgtagttttggacagctatggccgacgctgaaacggttgctggcgtatggctcgccatggcgaaaaccgctctctgtcgcggtgatgatgctgtggattgcggcggcggcggaggttagcggtccgctgctgatcagctatttcattgataacatggtggcccgccaccatttaccgttgggcaaggtcgcggggctggcggccgcctatgtggggctacaatttctggcggcggggctgcattacgcccagtctttattatttaaccgggcggccgttggcgtggttcagtccttgcgcacggacgtcatggatgccgccttgcgccagccgctaagcgccttcgacacgcagcctgtcggacaattaatttcacgcgtgaccaacgatacggaagtcatccgcgatctgtacgtcacggtcgtcgcaacggtattacgtagcgcggcgttgatcggcgccatgctggtcgctatgttcagccttgactggcggatggcgctggtggcgattttgatttttccggcggtattgaccgtgatgatcatttatcagcgctacagcacgccgattgtacgccgcgtgcgggcatacctggcggatattaacgacggctttaacgaaatcatcaatgggatgagcgtaatccagcagtttcgccagcaggcgcgcttcggcgaacgcatgggcgaggccagccgctcgcactacatggcgcggatgcagacgctgcgcttggatggctttttattgcgtccgctgcttagcctcttttccgcgctcattttatgcggtttgttgatgcttttcagctttacgtctgccggcacgattgaggtcggggtgctgtatgcgttcattagctatttgtcacgtctgaacgagccgctcattgaactgaccacccagcaatccatgctacagcaggcggttgtggcgggagaacgtgtttttgaactgatggatcgcccgcgccagcgctatggcagcgacgacaggccgttacaaagcggggcgattgatattgatcatctgtcgtttgcttaccgcgacgataatcttgttttacaggacattacgctatcagtaccgtcccgtagctttgtggcgctggtggggcacaccggcagcgggaagagcacgctcgccagcttattaatggggtattaccccctgacacaaggcgaaattcggctggatgggcgagaaatcgcctctcttaatcatcgcgttttacgccagggcgtggcgatggttcaacaggacccggtagtgatggcggatacctttctggctaatgtgacgctggggcgcgatgtctccgaggcgcaggtgtggcaggcgctggaaacggtacaactggcagatctggcgcgcggcctgagcgacgggctgcatacgcatctcggcgagcagggaaatacgctgtccgtcgggcaaaaacagctattggcgctggcgcgcgtgctggttgacgccccgcaaatattaattcttgatgaagcgacggccagcatcgattccggcactgagcaggcgatacagcaggcgctggcggcgattcgcgagcgcaccacgctggtggttattgcccatcggctatcgacaatcgtggaggcggataccattctggttctccatcgcggccaggcggtggagcgcgggacgcatcaacaattgctggcggcacaaggacgctactggcaaatgtatcaattacagttagttggcgaggagttagccgccagcgtacacgaagaacccggccctgcggcgtaaggtttggcgccacagggcaaaacctcgcccatcatgcaccgtcgtggtgcgtttttctttccctgtttcgattttggggcgcgtcaatataaagacgcgccgctaaccgcgcttttcctcgctcgccagcttctggcacatcctttgcaatatccattcagaagagtccatgcgcggcggcagccgttacctaattctgactggagggttctatgaagctggttaccgtgattatcaaaccgttcaagctggaggacgtgcgggaggcgctttcttccattggcattcagggactgaccgtcaccgaagtgaaagggtttggccgtcagaaaggacacgccgaactgtatcgcggcgcggagtacagcgtgaatttcctgccgaaggtcaaaattgatgtggctatcgccgacgaccaactggaagaggtgatcgatatcatcagtaaagcggcttacaccggaaaaattggcgacggcaaaattttcgtcgcggagctcatgcgcgttattcggattcgtaccggcgaagctgacgaagcagcgctgtaagacccgccacacagcaacaggaaatgaaaaaaatgaagatagcgatgataaaaaccacactggcttcactggcgctgctgcctgggctaacgatagccgcgccggcggttgccgataaagcggatagtgcttttatgatgatttgcaccgcgctggtgctgttcatgacgataccgggtatcgcgctgttttacggcggattaattcgcgccaagaacgtgctgtcaatgttaacgcaagtgaccgtcacctttgcgctggtctgtattttatgggtggtgtacggctattcgctggcttttggcgaagggaatcattttttcggtaatgccgatggggcgatgttgaagaatatcgcgttgacggcggtaacgggtacgatttatcagtatattcatgtcgcgtttcagggatctttcgcctgtattaccgtcgggctgattgtcggcgcgctggcggagcgtattcgtttttcggcggtactgatttttgtcgtggtgtggttcacgctctcttatatcccgattgcgcacatggtgtggggcggcggcctgctggctgctcacggcgcgctggattttgctggtggtacagtggtgcatattaacgccgctatcgctgggctggtgggggcttatttaattggcaaacgcgtcggctttgggaaggaagcatttaaaccccataacctgccgatggtctttaccggtactgcgattctgtatatcggctggtttggatttaacgcgggttctgccggtagcgcaaacgagatagcagcgctggcctttgtgaacaccgtggtggcgaccgccgccgcgattctggggtggattatcggcgagtggacgctacgcggtaagccttccctgctgggagcgtgttccggcgcgattgccggtctggtcggcgtgacgccagcctgtggctatgttggcgttggcggcgcgctggttatcggcgttattgcgggtctggcgggattgtggggagtcaccatgcttaaacgtctgctacgggtagatgatccgtgcgacgtatttggcgttcacggcgtttgcggaatagtcggctgtatcctgaccggcgtttttgccgccagttcgctgggcggcgttggctttgtcgacggcgttacgatgggacatcaggtgatggtacagctggaaagtattgctattacggtcgtctggtccggcgttgtcgcgtttgttggttacaaactggcggatatccttgttggactgcgtgtaccggaagagcaggagcgcgaggggctggatgtgaacagtcacggcgagaatgcgtataacgcgtgattgcgcaacatgcctgatggcgctgcgcttatccagtttaccgtaggccggataagcgcagcgtcatcaggccattaacgccgcatagcggcatgttttttaattgtgattgcgcattaccccttcctgcacggttgaagcgaccagcgcgccatcctgagtataaaactcgccgcgaacaaagccccgggcgctggaggcggaagtgctctccacgctataaagtagccattcattaaaattgaacgggcgatggaaccacatagagtgatcgatagtggcgatctgaatgcccttttccagaaaaccgatgccgtgaggctgaagcgcgacgggaaggaaattcaggtcagaggcatatcccagtaaatattgatggacgcgaatgtcatccggaacggtgccgttggcgcgaatccatacctgacgcacaggcgcggcgacgtgacctttcaacggattgtgaaattcgacgggacgaatttccagcgggcgatcgcagagaaacttttctttcagaatcggcggcagtaaatgcgccagcgattgcgcgatttccgtttctgacggtagtccttccggcccgactaccgtcggcatggttttttgatgttcaaaacccggttccggcgcctggaatgaggcggtcatgtaaaagatgggtttcccgttctgaatagcggcaacgcggcgggcgctgaagctattcccatcgcgcagcacttctacgtcatagataatgggtttttggctgtcgcctggccgcagaaaataactgtggaatgaatgcaccagtcgcgcttccggcaccgtttctttggcggcatagagcgcctggcccaccacctgaccgccaaatacctggcgcagccctaagtcttcactttggccccgaaagagtccttcttcaattttttccagattcaataatgtcagcaaattattcagtgtctgactcatacatactctccaggtgacaacgatgccgaagcgaggtagggcagagtataacgcaattttgcaagtggtccgatgggtacaaaagtctgaataacagaccaattccaggcaaaaatgagtgacatgtgccacacttaatcacgttatgtttctgttaaccactcttccggcggggggaaaggcctgctggtgcattgatgataaggagaattgaatgaaactcgtgcacatcgtaagtggtttagcggttgcgatatctctggcggcctgcgctgataaaagcgctgatatccagacgcctgcgccaaaccctaacatgtcgattacagctaaccagtctactattcagcaacccaatgtttccggtaccgtctggatccgccagaaggtcgctctgccgccagatgcggtgctgaccgtgacgctttcagatgcttcgctggctgatgcgccgtctaaggtgctgtcgcaaaaagcggtacgtaccgaaggtaaacaggcgcctttcagttttgtgttgccgtttaacccatcagatattcaacctaacgcgcgcatcctcctgagcgcggccatcaccgttgataataagctggtatttattaccgatagcgtgaaaccggtgattaataatggcggcactaaagcggatctgacgctggtaccggtacagcaaacggcggtgcctgtgcaggccagcggtggtgcgacgacgacggttccatcgacttcgccgacccaggtcaattcgtcttctgccgttcctgcgcctacccagtattaatcctgcgccaaccctctccgttacggagagggttaatacacccagcgatagcgttgtaaatcgatttgtccgcttcccgacaccaccacgccttccgccagtaatgcctgacgttgccgctgtagatccggcccggtaagtgatattgcgccgtggcggttcaccacccgatgccatggtaaagtgctgccttccggcagacgttttaaaactccgccgacctgacgcgccgcccgaggcgaaccggcaagccgggcgacatcgccgtaggtcgtgacaaacccttccgggatcgaggcgacgatttgccagacgcgttgaggaaatgtgtcctgaatatccataatagaatcctgcgttaatgcttcaggataatctggaataaggggggaggaaagcccggatgcgcaagaaaccagcatccgatgcctgatgggttgcaattgcacgatatagcagtgataatgcgcctgcgcgttggttcacaacgctctcaatgggggctctgttggttctcccgcaacgttactctgtttaccaggtcaggtccggaaggaagcagccaaggcagatgacgcgtgtgccgggatgtagctggcagggcccccacccatttgtgcctctccacactgttcttttctgctgtgcgacgttatagccgctgttccgcccaaagaataaatgccgtagcgggtaggggtttactgtataaccagccctgaccataatgtacgccatgctggcgtagccactgttcttgcctggccgtttcgatgccttctgcgaccatcttaagtttgagcgttttcgccatttcaataatatgcggcgtgacgtttttatattccagcgcatcgacaaaagatttatcaattttaaggacatccacatccagattttgtaagtagctgaggctggaatagccggtgccaaagtcatcaatataaattgaatgtcccgcgttacggtatctggcgacaatgggcgcgctggttttcggatcggcgaactcgcgttccgttaactcaagcgcgatttgcgacggagaaatttggctacggttcagcagcgtgcttaacagcgtcggcaacgtttccgacgccagatcggatgcctcaagattgattgaaatatgttgttcgggatgggactttaaccaactccccatgtcttcaaaaacggtgtcgatgattagccgggttagcggctccgtgagcccggtttgttcagccagcgcgataaaaatttccggcgaaaggaaggtgccgtccgcctgttgccagcgagctaaggcttcggcaccgacaatttttccgctgctcagggagacaataggctgatagtgtacgttaatttcgcgattgtctatcgcatcctggagacggtggcggggcgactgtagtcgacgcaaaatacgcagaataaaggccgcggccagcagacccgttacgatgcccgccggtagccagataaacgcctgtcgataccagctcctttccagcggagcggtcggtgcccagcttacgatagtaatgcccatttccggaaaggggtggatagcatactgaatgcctcggttttccagccgcaggggcgtctcatggtgaatgagcggaagaatagcggggtcaaggttaccgctgctggcaaccacagtattgcgttcccggccaataatagcgacgtcaatcggccatgcgccaaacggaatcacatcgataaaggacgccgggtcgatcatcacgatatagctgtcgctcccgagtgccgccatatagcgttttatacccagatcgttttgcgccgtaaaccaggcgcgataaccgtcgcgagtgattttcatgggcggagggaacgcgggaatatggctctctttttcaagtgaggagcaaacgggaatcgaatttttaagatacagaacttcctggacataccgaaagctataagacacgcggcgcatggcgagtaaatgggcactgctgcagggctcgcctttaaaggaggcaatatgcgttaacgcggcttttgcctggtcactgaccctttctgtacgtagcgccacccgggacgagaagatatccagctcttcattaaacctcttttcaacttgacggtgcgccagccacagactcaatcctatcgggaaaaggacagacaggataagcactcccgttaccaggctgaccagatgtcgtgttgtcacagtgatgtccttataaacacagcgtagagaaagtatatccgatcgtaaatcgcgccctcgaatgataaagctattttatcgattttacagattcaggcgccaggctaacgcgttacgccacgttgcttttgccgccaggaagagatcgtgaatgtttaccggttgaaaaaggagcgttgatagcgtattttattgttatgttataacataattgagagggcgcaatgaaacctgatattcatcctgtataccgcaccgtcgtatttcacgacaccagcgcaaatgaatatgtgaaagtgggatcaactatcaaaactgaacgtgaaatcgaactggacggcgtgacatatccgtatgtcactattgatgtgtcatcaaaatcgcatcctttttataccggtagacagaaaacgtttgatagcgaaagtagcgccgcacgcttccagaaacgtttcggtcattttatcggcgctaaacgggggtaaatgaaatgcaggtgttaaactcacttcgcaatgcaaaacaacggcatccggattgccagatagtcaaacgcaaaggacgcttatacgtgatttgtaaaacaaatccgcgttttaaggcggttcaggggcgtaaaaaaagacgttaaaaaaccaacagttcagggaaagcagtgcgtaccagggagggtgcgcacttttttattaccggctggcttctgcgcgggccagcgtaaaaatatcgtagaaggaaagttcgcccttacgggcaaccattttttgcagctggactttatgttcattatccacctgtggagactgaagaatcgtctcaatgagcgtggggggaacaaagcgggtgttgtaccattcgccgttgtaacagacccggaggtccagcacatcgatgtcgttatagtgataacgcggggcgatgtcgaaaaagaagaagccattaaatgcgataaataacaccactaacagccacactgaccccaccagcgtttctgattgcagcatgaccgccagcgtcgcaaaccaggctgcatacatcgcgataaataacccaggatgcttgcggataaaactgatactaaaacgcggcctgttatcgcgtttttcacggatgtttaagtcatcaatagtttcgctaagcaggcgctgtatctctgtcatcttttgccttcatgatttctgcgacataggggtagtaacagcccattttaaagggaggtgtaacgtgaaaaaagtaacagattaaccacgaattagcataacagttatcattttgactacaattttttaatgattcgcgccggatttccgcctaccacaacgtctggcggtacgttttttatcaccacagcgcctgaagcgacgacgacgttatcgccgatggttacgcccggattaacgacggctcgtccgcctatccagacattatttccgatagtgacgggtttacctaattctctgccgctgttgcgttcgacggcgtccagcggatgcgtggcggtatagatatgtacccctggcgcgagcatacaattatcgccaatatgaattgggcaaacatcaagcatgacgcagtcgaagttagcgtaaaaggagtgaccaagaaaaatattatagccgtagtcgcaacggaaggaaggttcaatataggcgtcttcgcatcgacccaacaggtcgcgtaaaatcgcctgacgcttatttatttcatcaggcgtagtataattgtattgatggatgagttgacgcgcccgcagtcgatcctggcataaagtttcatcggtcgggcaatacagtgccccagcgatcattttttgtttttcgtcactcatcgcgcgctccccttggtggatattatcgcaatagaagcaataataaagtattagagggaacgttccctgctattgctatgtgatctatatcactgttctataatagcccgttgtgttattagccagaacgaggaggcagataacacctgcgtgttctctaaaaagtaatgtagcgtgattaacgaatgaatttccatactgaagaggggatcttgtcgtagagtttgttcatcgtcaattctgcaagacggtgatccgcagctgagtaaaatacagccagctcattgtcggacaattcatatttatttttctcaatgacgcgctccagagtgtcaattgtctgacagcgccgtaaacgcatcaaataatcagttttagttaatggtttatcagacataaattctacctatgattgtaataatttttaacaagacaaactaacaggattggccctggtggcgttgacgaaacaacggaacaggcggttgcccgatttacgccatttttgcaaatcctgcgtattaataccatagctgctgaacaacataaaggtgtcgtccaggtattcatctatctgcgcaatcaatttattgtcttcattgtacttaattttataattaagcgcgaaagttgcaatatgctctatcagctcattgagctgcaggttgactgctgaggtcgggtcattaacccagccatggttgctttcttcaaggtttgcaagacagtcatgatacagggtttcgcaaagaaatttaagctgtgctatatcatgtcttttgggtgagtattcgtccataatgcatcccctttttagtggcttaaactaaccgaacaccttcgggatggatacaactaactaacctggtacttcccacgtcaccttatgatttaactataatctactctaaaaaacttttcatcgtcatattactaaaaattacaattgcgtgaaagccgcgtgttgccatactttttcgaattttaacagtgatcgtcggtcgcctaaaaaggaaccagttttattgtttgtgtaatcattgggttaacgttttttagcttttcaggctaaaacaatagactctgacaggagaaaatagccaggaatattcttaatatttcttaattaatggctgaattaagaaatggccaactttcctaagaaaagcctttaacgcagtaaggattataccttttattaatatggcaaaaaataatcaatctaacaataagcgtattttatgatttttgcgtaaaaaaggccgcttgcgcggccttatcaacagtgagcaaatcagcgatgttctgtcgaatgactatgctcaatatcttcgcttttacggctaaagcggcggcgtaccaccacgaagaagaccggtacgaagaaaatagccagtacggttgccgttaccatcccgcccagtacgccagtacctaccgcattctgcgcgccggaacccgcgccggaactgataaccagcggcataacccccagcatgaacgctaacgaggtcatcagaatcgggcgcaaacgcatccggacggcctccagcgtcgcttctaccagacctttcccttctttatccattaagtctttggcgaattcgacgataagtatcgcgttcttcgccgacaacccaatggttgtgagcaggcccacctggaagtaaacgtcgttagtcagtccgcggaaggtcgcagccagcagcgcgccgataaccccaagcggaacaaccagcattacggagaacgggatagaccagctctcatacaatgccgccagacacaggaagacgacgatcagcgatatagcatacagggcaggggcctggttgccggacaaccgctcctggtaggacatcccggtccagtcatacccaatgcctgacggcagcttgctggccagttcttccatcatcgccatcgcttcaccggtactcttgcctggcgccgcctgccccagaatttccatcgaaggcagaccgttatagcgttccagacgcggcgaaccatattcccagcgggaagaggagaatgcggagaatggcaccatctgaccatcgctaccacgaacgtaccagtcgttaatatcatccggcaacatgcggtatttcgcttcggacatcacgtaaactttcttcacacgaccgcgatcgataaagtcgtttacatagctgccgccccatgctgcgcccagcgtggtattaatgtcgctaatagatacgcccagcgcctgagctttttcctggtcgatatcgattttaaactgcggcgtatcttccagaccgttaggtcgaacgccgaccagcagatcaggatatttcgccacctcgccgaacaactgattacgtgcctgggtgagtttttcatgaccaagtcccgcctggtcaatcaactcgaagtcaaagccggttgcggtgcccagctcaacgatcgccggcaggttaaaggcgaagaccatcgcatctttaatttgtgaaaacgctgcggttgcccgctgggtaatcgcttcaaccttgtttttttcgcctggacgatcggcccagtctttcaacgacacgaatgcaataccggtattctgaccgcgccctgcaaaaccgaagccgttgacggcgaataccgattcaacgttggctttctctttgttcagatagtaatccgtgacctcatccagcactttttgcgtgcgctcttgcgttgcgcccgcggggagctggaccattgtcaggaatacgccctggtcttcatccggcaagaaagagcttggcagacgaacgaacagataagccataccgacgacgataatgagatagagcagcagataacgcccggtgctgcgcagaatattgcctacgctatcggtgtagtgatgcgtgctcttatcaaacaggcggttaaaccagccgaaaaagccttttttcccttcgccatgatcgcctttggcgacgggtttgagcatcgtcgcgcacagcgcaggcgtcaggatcagcgcgaccagcaccgacagcgccatcgccgatacgatggtgatagagaactgacgataaattgccccggttgagccgccaaagaaggccatcggaataaataccgccgacagtaccatcgcgatacccaccaatgcgccctgaatctggcccatggatttgcgcgtcgcttccttcggcggaaggccttcttccgtcataacacgttcgacgttctcgaccaccacgatggcgtcatccaccagcaagccgatggcgagcaccatcccgaacatcgtcagcgtgtttatcgagaaaccgaatgccgcaagcacggcaaaggttcccaacaacaccaccggaaccgcaatagtcggaatcaacgtcgcgcggaagttctgcaggaacaggtacatcaccaggaacacgaggataatcgcttcgaccagcgtttttaccacttcatgaatagagatcttcacgaacggcgtggtgtcatacgggtagacgattttcatccctggcgggaagaacggttccatttttttcagttcggcacgaatagcggtagcggtatccagcgcgttggcgccggtagccagtttgatgccaagacctgacgctggctgaccgttaaatttcgcaatgacgtcgtagttctcgccgccaagctcaattttcgctacatcccgcagacgaacctgggagccatcctgattcactttcagcaggattttgccaaactcatccgttgaggtcagacgcgtttgggcaataatcgatgcgttaagctgctggcctttaaccggcggcgtaccaccgagctgacctgccgcgacctgggcgttctgcgctttgatcgcgttaatcacgtcgaccggcgtcagttggtatttggtcagctctgtcggattcatccagatacgcatcgcatattgcgaaccaaacagctggacgtcgcccaccccagaggtacggctgatcggatctttcatattggcggcaacgtaatccgaaatatcctcctgggtcatggtgccgtcggtgttaatgacgcccactaccatcaggaagctacttgaggacttctcaacgctcacgccctgttgctgtacttcctggggaagtaacggcattgccagttgcaacttgttctgaacctgaacctgcgcgatatccgcatcggtgccggattcaaaggtcagcgtgatctgcacggtccccgtggagtcactgttggaggacatatacatcaggttatcgataccgttcatattctgttcgataacctgcgtgacggtatcctgtaccgttttcgcatcagcgccagggtaggttgcggagatcgtcactgctggtggcgcaatcgtcggatattgcgctaccggcaatttgaggatcgcgagcccccctgccaacatgatgatgatggcgatcacccacgcaaatatagggcgatcgataaagaaattaggcatgtcttaacggctcctgtttaagttaagacctgggctgagcaggttgatcaccgcttgcggcttgctgtttgttatccgcggtaatttcctgtactttaacctgtgcgccaggacgtactttttgcagcccgctgacgactacgcggtcgcccgctttcaatccgtcagtcaccagccacttatcgccgatcgcctggcttgcgacgatttggcgggtttccactttgttatcagcgccaaccaccagcaccgtggcatcgccgcgtggagtacgggtaacgccctgttgtggaaccagtaatgccgtcggttttgtcccttcctgcagacgtgcgcgaacgaacattcctggcaataaggtgtgatccgggttagggaagatggcgcgcaaagtaatagacccggtggtttggtcaacggtcacgtcggagaactcaagcgtaccggactgcgggaatttgataccgtcgctggtcaccaggtcgaccttcgctttgccgttttcctgtttcagcgaaccatttgccagctcctgcttcaggcgcaggaagtcattgctggactgggtcacatcgacataaatagggtccagctgctgcactgtcgccagcgccgacgcctgaccgttctgtaccagtgcgccttccgttacggatgacttaccaatacgaccgctaatcggcgaggtgactttggtatacgccaggttgatacgtgcggtttcaacggcggcttttgctgcgacaacagcggcagtcgcttgttgtgcgtcagccagcgcctgatcgtattcctgcttactgatgtactgcgtacccagcagcttttgataacgcttcaccgtcagttcagcgatattcgcggcggcctgcgcttttgccagatcgcccttagcgctgtcgtaagtcgcctggtaggtcgcaggatcaatctgatagagagagactcccgcttcgatatcacttccctcaacgaaattacgcttcaggataatgccgcttacctgcgggcgaacttcggcgatacggtaagcaacggtacgacccggaagttcagttgtgatttgcagtggttccgtttttagtgtgacaaccccaacttctggcatctgctggccgccttgctggtcctgtttgtcgtcacatcctgttagcgctaagctgcctgagagcatcagaacgaccgccagaggcgttaaccctctgtttttgttcatatgtaaacctcgagtgtccgatttcaaattggtcaatggtcaaaggtccttaaacccattgctgcgtttatattatcgtcgtgctatggtacatacatccataaatgtatgtaaatctaacgcctgtaaattcaccgacatatggcacgaaaaaccaaacaacaagcgctggagacacgacaacacatcctggatgtggccctgcgtttgttctcgcagcaaggcgtatcggcaacctcgctggcggagattgcgaacgctgctggcgtgacgcgcggcgcaatctattggcatttcaaaaataagtcggatttattcagtgagatctgggagctatcagaatccaatattggtgagcttgagattgagtatcaggcaaaattccccgacgatccactatctgtattaagagaaattttagttcatattcttgaagctactgtaacagaagaacgacgccgcttattgatggagattatattccataaatgtgagtttgtcggagaaatggttgtggttcaacaggcgcaacgtagcctttgtctggaaagttacgatcggattgaacaaacgttaaaacattgtattaatgctaaaatgctgcctgaaaatctgctgacccgtcgtgcggcgatactgatgcgcagctttatttcagggctcatggaaaactggttatttgctccgcaatcgtttgatttaaaaaaagaagctcgcgcctacgtcacgatcctgctggagatgtatcaattgtgtccgacgctgcgcgcgtcgacggtcaacggctccccctgataatattccaggaaaactcctggacattttctgtgtcgctattctgtttgttacaggcgtgatattcttgcgactcaattatttccggtctgcttgccggttcagacacttcattctcatgactatgttgcagctttataaacgttcacagcattttgtttttattacaattagcgtccttattatcctgctgtcctgtcagtctctggcatttgcccgggggcaaacgaatggcgacctgccgtcaaaagcggatgtgcaaaaccagctggatacgctgaataagcaaaaagatctctccgcccaggataagctcgtccagcaggaccttattgatacgttagctacgctggagaaaatcgagcgggtgaaagaggagaccgtacagctacggcagaaggtggcgcaggcgcctgaaaaaatgcgtcaggcgacggctgcgttgaatgcgctgagcgacgtcgataatgatgatgaaatgcgaaaaacgctgagtgcgctttcgctacgtcagcttgagctgcgcgtggcgcaggtactggatgatttgcaaaattcgcaaaacgatcttgccgcttataacagccagcttgtttcgctacagacccagcctgagcgcgtgcaaaacgccatgtataccgcctcacagcaaatacagcaaatccgtaaccgtcttgacggcaataacgtcggcgaagctgcgcttcgccccagccaacaggtgttattacaggcacaacaggcgctgcttaatgcgcagatcgaccagcaacgcaagagtcttgaaggaaataccgttttgcaggacaccctgcaaaaacagcgggattacgtgacggccaacagtaatcgccttgaacatcagcttcaacttttacaggaggcggtcaacagtaaacgacttacgctaacggaaaaaacggcccaggaggccatttcgccggacgaaacggcgcgtatccaggcaaacccgctggtaaaacaggaactggatattaaccatcaactcagccagcgtctgattgtcgcgaccgaaaacggcaatatgttgatgcagcaaaacattaaagtaaaaaactggctcgatcgcgcgctgcagtcggaaagaaatatcaaagaacagattgccgtcttaaaaggcagcctgttgctgtcgcgtattctttatcaacagcagcaaactctgccctccgccgacgaactcgaagatatgaccaaccgcattgcggatttgcgtctggagcagtttgaaatcaaccagcagcgtgatgccttattccaaagcgatgcctttgtcgacaagctggaggaggggcataccagcgaggtgaatgatgaagttcatgatgcgttgcttcaggtggtggagatgcgccgtgagctattggatcagctaaataaacagttgggtaaccagctgatgatggcgattaacctgcaagttaaccagcagcagttgatgagcgtctcgaaaaatctgaaagccattttgacgcagcagattttttgggtgaacagtaaccgccctatggactgggactggcttaaagcgttcccccaaacgttaaaagagcaattcagcgccatgaaaatcacggtgaactggcaaaaagcctggcccgcggtatttattgcttttttggccgggttgccgctcttgctcatcgccggtttaatccgctggcgtctgaaatggttaaaagcgtatcaacagaagctggccgccgccgtgggatcgctgcgtaacgatagtcagctcaatacgccaaaagctattctgatcgatctgatccgcgcgctgccggtgtgcctgattatcctcgcgcttggactgatcctgctgaccatgcagctaaatatcagcgatctgctctgggcctttagtaaaaagctcgcgatgttctggctggtctttgggctgtgctggaaggtgctggaaaaagagggcgtggcgatacgccattttggtatgccggcgcagttgaccagccactggcgtcgccagattgtacgcattagcctcgcattgctgccgctgcacttttggtctgtggtggcggagttgtcgccgctgaatctgatggatgacgtgctggggcaggcggttattttcctcaatctgctggtcataacattgctggtgtggccactgtgccgggaaagctggcgcgataaagaatctcacggcattcgactggtgaccgtgacgattctttccattattccagtggcgttaatggtattaacggcgaccggctatttctataccaccctgcgcctggcggggcgctggattgaaaccgtctatctggtcattatctggaacctgctttatcaaacggtgctgcgcgggttaagtgtagcggcgcgccggattgcctggcgacgcgcgctggctcgtcgtcagaacctggtaaaagagggtgcggaaggcgcggagccacaggaagaacccaccatcgcgctggagcagattaaccagcaaacattacgtatcacgatgctgctaatgcttgccctgtttggcgttatgttctgggcgatttggtccgatttgatcaccgtattcagctatcttgatagcattacgctgtggcactacaacggctccgaagctggcgctgcggtggtgaaaagcgtgacgatgggcagcttgctatttgccattattgccgcgatggtggcctgggcgctcatccgcaacttacccggcctgctggaagtgctggtgctttcacgcctgaatatgcgccagggggcttcgtatgcgatcaccacgatccttaactacgtcattatcgctgttggcgcgatgacagtattcggatcgctcggcgtctcgtgggataaactccagtggctggcggcggcgttgtcggtgggtctcggctttgggctacaggagatcttcggtaactttgtctcgggtttaatcatcctcttcgaacgtccggtacgcattggcgatacggtaacgatcggcacctactccggcacggtcagtaagattcgtattcgcgccaccactattaccgattttgatcgtaaagaagtgatcattccgaacaaagcgttcgtaacggagcggctaattaactggtccctctccgataccacgacacgtctggtgatccggcttggcgtggcttatggctcggatctggagaaagtgaaaagagtcttgctacaggcggcgatggagcatccgaaggtgatgcacgatccggaacctgccgtattcttcaccacctttggcgccagcactctggatcatgaactgcgtctgtacgtgcgtgaattgcgcgatcgtagccatacggtggatgaactgaaccgcgcgatcgatcgactgtgccgtgaaaatgatatcaatatcgcctttaaccagcttgaggtgcatctgcataacgcgaagggcgacgaagtcactgaagtgaagcgcgatctcaacggcggcgatctggcacctacggcaagctaaaaggcggtgggccgcgcgctttatgagtgcgcgcggcgccgctaatgcgaaagcgtagaaagctcttccggcgtaatgccggtgacgctggcgatgagcccgggttccagcccgttggcaagcattttgcgggcaatagcgcgcgcttcggcctcacggccttgtgctaacccttgctcaaggcctttttgcaggcccttttgcaacccttccgttcggcctttttcttccagccattccgctattgtcatcagttgttccttatactgcggcgcgccctgcgccagttgacgaattagcgccccgggttctgcggcgtttcctgctttcaacatatagttgatcagcacactgagctgcgcgtccgtcaaatgatcctgcgttaaaagcgtgataagggggtcgagcagttcgcttaaatcgcgttgacgaatatgtttttgcaggagctctaacatcgctatccgccgatgctgcaaaagctgattatccggcattgtcgtcaggtcgaccagcgcaaaatcgcggctgtataaggccttcgccatatccggtttcacaaacatattatgccagttaaggctatagggccacgggctttccggaccgtgataaaaaaggattggtaccaccagcggcaaggtatcatgaccggcatccagatgacgctgcatggcggcaatggcgtaacgcatcaggcgaaaagccatcagccggtctgatttgctctgatgttcaatgagcgcgtaaacatacccggggccgtgttgggtatgcagagagtagagaatatctgaatagcggctgcgtaaattgtcttcaacaaaactccccgactccagcttcagtgaatccagatcgcagattgcaagaaagtcttctggcatgtggatagccagaaagtcgcgggcgacctctttttgcatcagcatctgtcgaaataccgcatcgtgcggcgtggtgggtagacgttccatgccccgtcctttgttgcctgactgtagcgaccactctgtcagcgacaacgaggacaaaccagcgggcaattactctgtttgcgagtcgtcttccgtactttttaacttgttttcataatcacgcataactatttccagcgcgcgtagcaccgttcgtgccggtaagcgattctcttcaagcagcacaattaaatccacggccagtttgacttcatcaggggcattttcaagcgacatactttctccagggttagcgggttaaacgcgccagtacgttttctattttctccagcgcatgtcggcaacgcgccagccgtccttcatagatctcgacttccttttgcagcgtttgttgttcgacaaggccggtcgcctgcgccagacgaattttgcgctcctgtgtcatcgccagtagtcgacgttcaaactcctgatgctgtattcgtctgcgctgccaacggccaagccctggcgcggcggcgtcccactggcgcagcgaccaggcggcggtttcacgcgatatcgcctccagttgcgaagccagatgttccgccagccaggcgacttgcggcagttgctcatgttttaccgcctgacgcaacgcgacgagattggcgcctgcctcttccagatatccctgcaacagagtactgcgggtacggaaaaggtgtcggtcaaagcgcgcgcttaacgtcgcatgttgcgccagcggcgcgcagcgttggcgtagcgtcgccagcctctcttccagcgtctgtaacagcatagcggttttcaattcaacaccccgatgaaaataagacaggctgtgctacagtagccttctgtttgataacgattcgcattatgcaacgtactattttaatcatcattggctggctggcggtagtattagggacattgggcgtggttttgcccctgttgccgactacgccgttcattttactggcggcctggtgtttcgcccgctcgtcgcctcgtttccatgcctggttgttataccgctcatggtttggcggttatctgcgccactggcagcgctatcgggccatgccgccgggagcgaaaccgcgagcgatcgcgttgatattgctgacctttggtatttcgctgtggctggtgaatatgatgtgggtgcgggtgctgctgttggttattttggcctgtctgctgatttttatgtggcggataccggtgattgatgaaaagcaacaaaagcgctgaagcacacgaatcgctgttgcaattgtcgttcacagccagtaaattcgaccgttttcgagcacaggcgcaggcggtcaaagagtaaccgagcgttacccctgaccgaaaagtattgcgccgtgagtaacaccgtacttagcaggcatatatccatgaccgcgactgcacagcagcttgagtttctcaaaaacagcatcaaaagcattcaggattacccgaaaccgggcattcttttccgtgatgtcaccagcttactggaagacccgaaagcctacgcgctcagtattgaattgttggttgagcgttataaaaatgcgggtatcaccaaagtggtcggcaccgaagcgcgtggcttcctgtttggcgcgccggttgcgcttgggctgggcgttggttttgttccggtacgtaaaccgcgcaaattaccgcgtgaaactattgccgagacctatgaattagagtacggcaccgatcagctggaaattcatgtcgacgcgattaaacctggcgacaacgtgctggtcgtggacgatctgctggcgactggcggcaccattgaggcgaccgtgaagctgatccgtcgtctgggcgggaaagtcaccgatgcggcgttcatcatcaatttgttcgatctgggcggcgagcagcgtctggaaaagcaggggattacctgttatagcctggtgccgtttccagggcattgattcaggctattcgcactgctattttagccagagagacaacctcgctgtatcggcgaggttgtgttagcattacccttctatgaatccaccttccagcgtttcagagcctgccaatgagttatcaggtcttagccagaaaatggcgcccacaaacctttgctgacgtcgtcggccaggaacatgtgctgaccgcactggcgaacggcttgtcgttagggcgcattcatcacgcatatcttttttccggcacgcgcggcgtcggtaaaacctctatcgcccggctgctggcgaaggggctgaactgcgaaaccggtattaccgcgacgccgtgcggcgtttgcgataactgtcgggaaattgagcaggggcgttttgtcgatctcattgagattgacgccgcatcgcgtaccaaagtcgaagacacccgcgacctgctggataacgtccagtacgcgcctgcgcgcggtcgctttaaagtctatctgatcgatgaagtccacatgctgtcgcgccacagctttaatgcgctacttaaaacgcttgaagaaccgccagcgcatgtgaaatttttactggcgaccaccgatccgcagaagctgccggtgaccattttgtcgcgctgcctacagtttcatctcaaagcgctggatgttgaacagattcgccatcagcttgagcatattctcaatgaggaacatatcgctcacgaaccccgcgcgttgcagttgttatcgcgtgcggctgacggcagcctgcgcgatgcattaagtctgactgaccaggcgatcgccagcggcgacgggcaggtttcgacgcaggcggtaagcgccatgctcggtacgctggacgacgaccaggctttgtcattagttgaggcggtggttgacgctaacggcgaacgcgtcatgtcgcttatcaacgaggcggcggcgcgcggtattgaatgggaagcgctgctggtcgaaatgcttagcctgctgcaccgtattgcgatggtgcaactttcgcctgccgcgttaggcagcgatatggcggctatcgagcaacggatgcgcgaacttgcccggacggtgcctcccggcgatcttcagctctattatcagacgttgttgattggtcgcaaagaattgccctgggcgccggaccggcggatgggcgttgaaatgacgttactgcgtgcactggcgtttcacccgcgtatgcccttgccggagcctgaaacgccgcggcagtcttttgcgcccgtggccccaacggcggtaatgacgccgccgcagctgcagcagccgtcggcgcccgcgccgcagacatcgccagcgccgctgccggcgtctaccagtcaggtgctggcggcgcgcaatcagctacagcgcgcgcagggagtaaccaaaacaaaaaagagtgaaccggcagccgcatcccgcgcgcggccggtgaataactctgcgctggagcggctggcctcggtttcggagcgcgtacaggcgcgcccggcgccgtccgcgctggaaacggcgccagtaaagaaagaggcttatcgctggaaggccaccacgccggtagtacaaaccaaagaagtggtggctacgccaaaagcgcttaagaaagctctggagcatgaaaaaacgccggagctggcggctaaactggcggcggaagcgattgagcgcgatccgtgggcggcgcaggtaagccagctttctttgcctaagctggtggagcaggtggcgcttaatgcctggaaggagcagaacggcaacgcggtttgtctgcatctgcgttcgacgcagcggcacctcaattccagcggcgcgcagcaaaagctggcgcaagcgctcagcgatctgacgggaacgacggttgaactgaccatcgttgaagatgataatcccgcggtgcgtacgccgctggaatggcgtcaggccatttatgaagagaaactcgcgcaagcgcgtgagtcaattattgcggataataacattcagacgctgcgtcgattcttcgacgccgagctggatgaagagagtatccgccccatttgatcgtaagcccggcttgcgattgtgaaccatcaagagagagagcttatgtttggaaaaggcggtctgggcaatctgatgaaacaggcccagcagatgcaggaaaaaatgcagaaaatgcaggaagagattgcgcagctggaagtgaccggcgaatccggcgcgggtctggtgaaggttaccatcaacggcgcgcataactgccgccgcgtggaaattgacccaagcctgctggaagatgacaaagagatgctggaagatctggtcgctgcggccttcaacgatgcggcgcgccgcattgaagagacgcaaaaagagaagatggcttccgtctcttccggtatgcaactgccgccaggctttaagatgccattctgatgcaaaccagtccgctgttaactcagcttatggaagcgttgcgctgccttccgggcgttggccctaagtcggcgcagcggatggcgtttaccctgttgcagcgcgatcgcagcggcggaatgcgcctggcgcaggcgctgactcgggcgatgtcggaaatcggccactgcgccgactgccgcacctttaccgagcaggatgtttgtaatatctgctcgaacccgcggcgtcaggaaaacggccagatttgcgtggtggagagtcctgcggatatctacgccattgagcagaccgggcaattttccgggcggtatttcgtgctgatgggccacctgtcgccgctggacggcatcgggccggatgatatcggtcttgatcgtctggaacagcggctggcgtcagaaaaaatcagtgagctgatcctcgcgaccaacccgacggttgaaggggaggctaccgcgaactatattgccgagctgtgcgcggaggccggcgtcgaagccagtcgtatcgcccacggcgtgccggttggcggcgaactggagatggtcgacggtacgacgctgtcccactcgctggcgggacgccataagattattttctgaacaaacggaggcggcattcgcggcctccgcttgaaatcacacccgcttgtccccatctcaccctcaacgtatttttaccattaaaaatggcattgttgaggtctatccacatgaaaggacaagaaacgcgtggttttcagtcagaagttaaacagcttctgcacctgatgatccattctctttattccaataaagaaatcttcctgcgtgaactcatctctaacgcctcagatgcggcggacaagctgcgtttccgcgctctgtcaaacccggatctgtatgaaggagatggcgagctgcgtgtgcgcgtctctttcgataaagataagcgtacgttgaccattgccgataacggcgtggggatgaatcgtgatgaggtgattgaccacttaggcaccattgccaagtccggcaccaaatctttcctcgaatcaatggggtccgatcaggcgaaagatagccagctcatcggtcagtttggcgtaggcttctactccgcgtttattgtggccgataaagtgaccgtacgtactcgtgcggcaggcgacaagccggaaaatggcgtgttctgggaatcggcaggcgaaggcgaatacaccgttgccgatatcaccaaaaatgaccgtggtacggaaatcaccttacacctgcgtgaaggcgaagatgaattcctcgatgactggcgcgtacgctcgattatcagcaaatattccgatcacatcgcattgccggtagagattgaaaaacgggaagaaaaagacggcgaaaccgtgatttcctgggagaaaatcaacaaggcccaggcgttgtggacccgtaacaagtcggaaattaaagacgacgagtacaacgagttttacaagcacatcgcgcatgatttcaccgatccgctgacctggagccacaaccgcgtggaaggtaagcaggagtacaccagcctgctgtatatcccgtcgcaggcgccgtgggatctgtggaaccgcgatcacaaacatggtctgaagctgtacgtacagcgcgtgttcattatggacgatgccgagcagttcatgccgaactatctgcgtttcgtgcgcggcctgattgattctaatgacctgccgttgaacgtctcccgtgaaatcctgcaggacagcacggtaacgcgtaatctgcgtagcgctctgaccaaacgcgtcctgcaaatgctggaaaaactggcgaaagacgacgcggaaaaataccaaaccttctggaaacagttcggtctggtgctgaaagaaggcccggcggaagatcacgccaaccaggaagcgatcgctaaactgttgcgctttgcctccacccataccgactcttccgcccagaccgtgtcgctggaagattacgtctcccggatgaaagaagggcaggaaaaaatctactacatcaccgcagacagctatgcggcggcgaaaaacagcccgcacctggaactgctgcgtaagaaaggcatcgaagtgctgctgctctccgatcgcatcgacgagtggatgatgaactacctgaccgagtttgacggtaaagcattccagtcggtcgctaaagccgatgaatccatcgaaaaactggcggatgaagtcgacgaaaacgcgaaagaagcggaaaaggcgcttgagccgtttgtggagcgtgtcaaaaccctgctgggcgatcgcgtgaaagacgtgcgtctgacgcaccgtttaaccgacacgccggcgattgtcaccaccgatgcggatgaaatgagcacccagatggcgaaactgttcgccgcggctggtcagtccgtgccggaagtgaaatacatctttgagctcaacccggatcatgtgctggttaaacgcactgccgataccaaggatgaagcgcagtttaaagagtgggttgagctgctgctggatcaggcgctgttcgctgaacgcggtacgctggaagatccgaaccagtttatccgccgtatgaaccagttgctggtgtcctgataacgctcatctgactgccggatggcgacgcgaagcgtcttatccggcctacggcgagtactgtttgtaggccggataagcgccagcgccatccggcattttttataataccttctcttttctggatttctcttcgttaaccgtttcagcatcaggcggcttccttgagcgaaatgcgtgatggtggtatcgtttagcgctttttaaaaaatatcgacaacctttgaggggattttcgtaatgcgtattattctgcttggcgctccgggcgcgggtaaaggaactcaggctcagttcatcatggagaaatatggtattccgcaaatctccactggcgatatgctgcgcgccgcagtgaaatcaggctccgagttgggcaaacaggcgaaagatatcatggacgccggtaaactggtgaccgatgaactggtgattgcgctggttaaagagcgtatcgcccaggaagactgccgtaacggttttctgctggacggtttcccgcgcacgatcccgcaggctgacgcgatgaaagaagcgggtattgtcgtggattacgtgctggaattcgacgtaccggacgaactgatcgttgaccgtattgtgggtcgtcgcgtacacgccgcctctggccgcgtttaccacgttaagtttaatccgccgaaagtggaaggcaaagatgacgtcaccggcgaagatctgaccacccgtaaagacgatcaggaagagaccgttcgcaaacgtctggtggaatatcatcagatgaccgcgccgctgattggctactaccagaaagaagcggaagcgggcaacaccaaatacgctaaagttgacggtacgcaggccgttgccgacgtgcgcgcagcgctggaaaaaatcctcggttaattttttcgcgtagtgaagcacttatcaggcctgctgttatcccgcaagcctgataagcgtaacgccatcaggcaatcggtgccggatggcggcctgaacgccttatccggcctactggcatcgttagcgccattcggcaaattctcgtcttacctctcgcagcaattagttcttctttatcgcttttccgctacaattatcaacaatttgaatagataagaggcggcaatgcgtcagacgaaaaccggtatcctgctggctaaccttggcacgccagatgccccaactcctgaagcggtaaagcgttacctgaaacaatttttaagcgacagacgcgtggtggatactcctcgtctgctgtggtggccgctgctgcgtggcgttattttaccgctgcgttcgccgcgcgtcgcgaaactctatcaatctatctggatggatggcggttcgccgctcatggtatatagccgcgaacagcaacaggcgctggccgcgcggttgccagatacgcccgtcgcgctggggatgagctacggctcgccctcgctggaaagcgctgtcgatgaactgttagcaagcgacgtcgaccatatcgtcgtgctgccgttgtacccgcaatactcttgctcaacggtgggcgcagtctgggacgaactggggcggatactggcgcgtaaacgtcgtattcccggtatctcatttattcgcgattacgcggatgacggcgcttatatcgatgcgctggcgaaaagcgcgcgtgagtcgttcgccaggcacggcgagcccgatgtgcttctgctctcctatcacggcattccacaacgttatgcggatgaaggcgatgactatccgcagcgctgccgcgataccacgcgcgaactggtttccgcattgggactgccgccggaaaaggtaatgatgacgttccagtcgcgctttggccgtgaaccgtggctgacgccgtacaccgatgaaacgctaaaaatgttgggtgaaaaggggactggccatattcaggttatgtgtccgggatttgccgcggattgtctggagacgctggaagagatagcggaacagaaccgcgagattttccttgaagcgggcggtaaaaaatatgcgtacattccggcgctgaacgcgacgccggaacatattgatatgatgctgaaactcacggcgccgtaccgttaacgcggcgtcttcatcctcgccataaagaagcgtgcgccgtcctgcaaggcatcgtcggcgattgtcatcattcgcgaatagtgcagaaaggcgtgcagcgtgccgggatacattttgtattcgcagggctgctggtgcgcctgtaatgtctggtgcagcaagcggctgtcatcaatgagcggatcaaactccgcgctggcaataaagcagggcggcacatcgcgcgtgagatcgttattaaacagacaataccagggcgattcccgatcttcatcgttacgcagataggccttttcgtacatgtccagatcttcacgcgtcaggccgtcccacgcgccgccgaacagacggcggcttaccgaatcttgcaacccatacagcccataccacaacagaatcgcgataacgttaccgcagcgaatgtgcttatcacgtagccagagcgcgctggcaagcgccagcatggcgcctgcggaatctccggcgaaaccgattttctccacgttgagcgagtattcatcggcatgttgagagaagtagctgcataccgcgacggtttcttcaatggcctgtggataacgcgcttgcggcgacagcgaataatcaatgccgatcacggtgcagccggtataacgcgccagcagacgcattatccggtcatgcgtatccaggttaccgaggataaatccgccgccgtgcagatagtataaggtggcctggctggtcggctgcggcgagtagagccgggttgttacatcgccataaggcgtagggacggcgcaggtgcgggtggtcatggacggcgcgtcggcattccagaaacggcgctcaagaagataatactgacgctgggtctcaatatcgccatcggcaggccaggggggaaggcctggttgctggaagtttacgacggctgtcatttcgtctgacagtcgggtgagtacgggaattttattttccggcttcataaaacgctccttgtgaaagtgaaccattgtaaaaaacgcggctggagaaactgcgatctcgtcgtccgatattgaaacgccatcgtccgtcgcgcgcagcagggggaatgtgctaccatgcagcgctccgttattcatccgtaagcacaatcatgaaatttcccggtaaacgtaaatccaaacactattttcccgtcaatgcgcgtgacccgttgttgcaacaaattcagccagaacaggaaaccaacgcctcctgggtcgtcggtatcgaccagacgttggtggatattgaggcgaaagtggatgacgattttattacacgctatggattaagcgccgggcattctctggtgatagaagacgaggtggcggagaagctgtatcaggaactgacgcgggaaaatctgatcacccatcagtttgctggcggcaccataggcaatacgatgcacaattactcggtactggcggatgaccgttcggtgttactgggcgtgatgtgcagcaacattgagattggcagctacgcttatcgctacctgtgtaatacttccagccgtaccgacctgaattatctgcaagcggtagatggcccgattggccgctgtttcacgctgattggcgaatccggcgagcgtaccttcgctatcagccccggccatatgaatcagttacgggcggaaagtattccggaagcggtgatcgctggcgcttccgcgctggtgttgacctcatatctggtgcgctgtaagcctggcgaaccgatgcctgacgcgacgatgaaagcgatcgaatacgcgaaaaagcataacgtgccggttgtcatgacgctgggcaccaaatttgtgatcgccgataatccgcagtggtggcaggcgtttctcaaagagaatgtctcgattctggcaatgaatgaagaagaagcggaagcgctgaccggcgaaaacgacccgctgctggcggcggataaggcgctggactgggtcgacctggtgttatgcaccgccgggccgatagggttatatatggcgggcttcaccgaagaggaagcaaaacgtaaaacccagcatccgctgctaccgggagctattgctgaatttaaccagtatgaatttagccgggcaatgcgccataaagattgtattaatccgctgcgcgtttattcgcatattgcgccgtatatgggcgggccggaaaaaatcatgaacaccaacggcgcgggcgatggcgcgctggcggcgctgctgcacgatattacggcgaacagttaccatcgtagcaacgtaccgaactccagtaagcacaaatttacctggctgacctattcgtcgctggcgcaggtgtgtaaatatgctaaccgtgtcagttatcaggtactgaaccagcattctccgcgtctgacacgcgggctgccggaacgtgaggacagcctggaagagtcgtactgggatcgctaatctggcttgcccgatggcgctgcgcgcatcgggccgtccggcaaacccttaactggcgacgacttcacccgcgggcggcgtttcaagcagttccagcatcgcccgggcaatttctcgctcgcccatcactacttgattggctccccgctcggtaatatatttcacttcatcatcatagtgcgcgcgggcgattatctcgatatcaggactttttccccgcgctgaggcgacaatctcaccggcttcgtaaccgttggggatggtcaataacagccagcgagcgcagtccagatgcgccagattcatgatttcttcgttagcggcgttgcccagtacggcgcgaatcccgcgttcgcgcagttcatccacgcgggtacgggacgtttcgataaccaccagcggaatccccgccgccagtaatttttctcccagcagactgcctacgcggccaaaacccaccagcagggcatgattacagatatccaccggaatttgcttctcttcttcgatagcctcttccagagtttgctcttccagcgtttcggttttcgccagatacttctccagcagggtaaacagtacgggattaagcataatcgacaaaatagcgcctgccagcaccaggttctgtcccgcttgcggcagcaggttgagcgccatgccgagcccggcgagaataaaggcgaactcgccgatttgcgccaggctggcggcaatggtcagcgcggttcgcggcgagtggccgaacaaacgcaccaggaaaaacgcagcgatcgatttgccaaagacgataatggcaagcgtcgccaacaccgccagcggctgttgaatcaagactaacggatcgaacaacatgccgacggaaacaaaaaacaggacggcaaaggcgtcgcgcagcggcaacgtatcgtgcgccgcccggtgactcagttccgactcattaagcaccattccagcgaagaacgcgcccagcgcaaaagagacgtcaaacagttctaccgcgccaaacgcaatgcctaacgccagcgccagtacggaaagggtaaataattcgcgcgagccggtggcggcgctgcgggccataatccacggcaccaggcggcgtccgaccagcatcatgatggcgataaacgccaccactttaccaatggttatccccatatcgactgtcagcgaggctatgccgacatcgcctttttccaccatgccggcaacggcgggcagcaagaccagcgtcagcaccatcaccagatcttcgacaatcagccagccgatggcgatttgcccgcgctggctatcaaggagttgtcgctcctcaagcgcgcgcagcaggacgacggtactggctgtagacagacagagcccaaaaacgatgccggtcattaatgaccatcccagcacggcggaaagcgccatacccagcagcgtcgccaccgctatctgagcgacagcgccgggaatggcgatagactttaccgccatcaaatccttcagcgaaaaatgcagcccgacgccgaacatcaatagaatcacgccgagctccgccagctccggcgccagtttggtatccgcaacaaaacccggggtaaaaggtcccgccagaacgcccgctaacagatatcccaccagtggagaaatacgcaatttgttggcaatcatgccgagaataaaagcgagcacaaggccgccgacaatggtggtgataagcggggtagcgtgatgcattccgtctcctttggttgctggactccaaaactccgggtaatagtttatgacaatttcaatcaggatgtttataaaaaatggttgtgttttataaaaagatacgatctgaaggcaaaaagagcacggaacgtaaaagtgataagtataggatggacaaagcaagatggcatcaggatgtacaggcggttaaagcgtacctttaaccgccataaaatcatgctttatgtcgattatcaggtaagaatatggtcagtatccccagaagcggcaggaaagcacagattttataaactaaatagatactggtatggtcggcaatcagccccagcaccgctgcgcccaggcctcccatcccgaaggcaaacccgaaaaacaggccggaaaccataccgatgcgtcctggcagcagctcctgggcatacaccagaatggcggaaaacgccgacgcgagaataaagccgataatcaccgttaaaatccccgtccagtacagcgtggcgtagggtaaaacaagggtaaacggcgcgacgccgagaatagagccccaaatcacatatttcctgccgattttatcgcccaccggcccgccgattaccgtcccggcagccaccgcaaacaggaaggcaaacagatggagctgcgcgttttgtattgataatccgaatttttgcatcagataaaaggtgtagtagctactgatgctcgccatataaaaatatttcgagaaaatgagtagcaataacacgctgaccgccagcacgactttattgcgcggcagcgggttagcgattatcgcttttggcttgcctttcgctatccggtgctgggctgcataccagcggctgatctgcgccagcaccacgatcgccagcagcgcggccagcacaaaccaggcgacattccctttgccatagggcgcgataatcacggcggccagcagcgggcccaatgaactgccgaagttaccgccgacctggaagatagactgcgccagaccatgacgtccgccggaggccatgcgcgccacgcgggacgattccgggtgaaaaacggacgagccggtacccaccagcgccgcagcgagcaatacgccgccaaaacttcccgccattgccagcagtaccagcccgctcagggtaaaacacatgccgacaggcagcgaccacggcatgggatacttatccgtccagtagccgacgaccggttgcagcagcgatgaggcgagctggaacgtcagggtgatcaaacctatctggacgaaggtcagcgagaactccgcctgcaacaggggataaatggctaagattagcgactggatcatatcgttcagcagatgggaaagactgatcgcgcccaaaataccaaacgaagtacgtgctttagcggccgctgcgggcgcgccggctaacggctgggttggttcactcatggccatagaaagtcacttaaattttatgcgatgttggagatagtaggatgtgtaattattacttgcctaacatacctgtgaaatgtgtttgaaggaagtctcaattctgaaaacatatttgtctattattgcaaggaaaggtaatttctgcggttgatattgagtcagggagagaaagatgaaatttttgaaacggggtgtggcgctggcgttactggcggcgttcgcgctgacgactcagcctgcacaggcttacgaaaaagataaaacctataaaattactatcctgcataccaacgatcaccacggtcacttctggcgcagcgaatatggcgaatatggtctggcggcgcaaaaaacgctggtggacagtatccgtaaagaggtggcgcaagaggggggaagcgtcctgttgttatccggcggcgacattaataccggggtgccggaatccgatctccaggatgcggagcccgatttccgcgggatgaatctgattggctacgacgctatggccgtcggtaatcatgaatttgataatccgctcaccgtattgcgccagcaggaaaagtgggcgaagtttccctttctttccgccaatatttatcaaaaaagtaccggcgagcgtctgtttaagccgtgggctatttttacacgccaggatataaaaatcgcggtaatcggcttaaccaccgatgacacggcgaaaataggcaacccggaatatttcaccgatattgagtttcgtaaacctgctgaagaagcaaaggtggtgattcaggaacttaatatgaatgaaaaaccggacgtgattatcgcgaccacgcatatgggacattatgacaacggcgatcacggttcgaacgcgccgggcgacgttgagatggcgcgtagcctgcctgccggttcgttggcgatgattgtgggcggtcactcacaagacccggtatgcatggcgtcggaaaataaaaaacaggtgaattacgtaccgggaacgccctgcgcgccggataagcaaaatggcatctggatcgtgcaggcgcatgagtggggtaaatatgtgggccgtgcggatttcgaattccgtaacggcgagatgaaaatggttaactaccagcttattccggtaaatctcaagaaaaaagtgacctgggataacgggaaaagcgagcgtgtactttacacgccggaaatcgcagaaaatccgcaaatgctctcgttattaacgccgttccagaataaaggtaaagcgcaactggaggtgaaaattggtagcgtgaatggccttcttgaaggcgatcgcagtaaggtcagatttgtccagaccaatatgggacgggggattctggctgcgcagatcgcgcgcaccggcgccgattttggcgtgatgagcggcggcggtattcgcgactcgattgaggcgggagatattacctataaaagcgtgctcaaggtacagccgttcggcaacattgtggtgtatgccgatatgagcggcaaagaggtggttgattatctcaccgccgtagcacagatgaaaccggactccggcgcctatccacagctcgccaatgtgagctttgtcgccaaagagggcaagctcaccgatctgaaaatcaaaggcgagcctgttgatccggctaaaacctatcgcatggcgacgctgagtttcaacgccacgggcggcgatggttatccgcgcattgataacaaaccgggctacgtgaataccgggtttattgacgcggaagtgctgaaagagtttattcagcaaaattcaccgctggatgcggcggcgtttacgccaaatggtgaggtgagctggctgtagcggtacggatagccatttctgcctgatggcgcgcaaccttaaggcctacggattatgtctgctgtaggccggataaggcgtttgcgccgctatccggcaatgtattttacgcaggcttaatcccgacgcgcgatatcagcgaatttagcacccaggatggcggccaaatcgtcagccgccagttcaatatccagcccgcgtttaccaccggaaacataaatagtggcaaacgtgcgggctggcgcgtcaatcagcgtgggcagccgtttcttctgtcccagcggactgatcccgccgaccagatatcccgtggtgcgttgcgccaccatcgggtcggccatatcgacctttttcgcgcccagagctttggcgacttttttcaaatccagctgtccggctacaggcgtcacggcgacggccagttgcttcatatcgccattcacggcgaccaaaagcgttttatacacctgatcggcgtttagcccgagcttacgcaccacttcatcgccaaagttagtttcattcggatcgtgatcgtaggtgtgaatgttaaacggaatcttgtttttttcgagtaacttaactgcgggtgtcataacgttccttcttactacagacgtgatttgccatcagcatacgcccgaaagcggactaaaaaatagtataatcttgtgcattaggtcttggcagttgcggcaactttgagcgacaatctgaagatccgaagcgaaagcgtcgggataataataacgatgaaattcctctttgacgggccaatagcgatattggccatttttttatttcaatatttgcggtaggttgccttcgccgtacagatgtagcgcccctacggctaccacgtagcgtcccggcggcagtgccagcagcgcgtcgcgccaggcttcattgcgtttcaccatcagtacatcatacagcggctggctaaacgttctggggagcgaagcgccgacgctggtcggcggctgctcaagccaccagccgatcatcacctgcaaaagccgtgcgttggtgtgccagtgcgtcagcgtgtcgtcgagcagcgccatcccgccatcgggcagatcgcagagtagttcgagctggtgtttcgccccttccagctcttgcaccggcagcgacatttcgcgggcagcctgtaatagctgataatcaatgccatagtccgggcgcaatcccagccgttgcgcctgcgtggcctgtagcaccatagctatctgccataaaggttgattatcaaaatggatcagcggcatacccaactcactgacccgtttttccagtgcgcttagctgcccggcgctgagacgttcgaccaacggcgggcatttggggagattgctgaatggcgtttcgttaccagaaatatccgcttcaacgaccagcgcgtcggcctggtgtagctttttcaccagctttgctggaagaggagccatatcgcgcgtccccatatgaatactgccaaccagatgcagatgacgaccgccgggcagggagagatcgatagcaggccaactatttggggtaccacgcagcgcgcgccataaacgtttaagttgatttaatagctccatacgcgctccctttgaaaaagctcatgctagcgcgttggagaaaagggcgcaatgcgccctgacgggacgtcaacgatcggtcgggttattcgctgccgtcgagataggccgttctggcgatggtcatttcaagctggcatttataaatactgatgcgcttttcagcgggtatggcctcggatttggcatcgctaagtttgccgcactgctgctctttttgggtcacccagactcgctgctcttgttttaatgccgttcgggcagaggcgggtagtgaattccagacctgattaagctcgcgatctctactttcaaatttctttgctgcgatttcaatcagtgagttatttttttctttataatgctatcaccagataccgtcattcttgccattacataaatagatcgcgccaatttatcggttttttgcacagaggtgacaacaatatctttgttgttgtctgctagctgaatattgtagttaacctgtttccaggtcaccgtattgtttattacctgtccatccccttgtgaaatatagaatagagtatttggtaagtctttcattaatttaaataatggctgaggaatacccatggcgacggtagccgagcaagttcgtaggttggcattttctgcttgagggttctgcgtgattacatcactgaattgaacaggaatagcccggagttgttgctcgtattgagtctgggggatatcgaagaaaagcgtggagggctctttaatatagtcttgctgtaaacgacctaatgcttcattgtaaatccattcttttgccgccgtgactgcattatcgttgccacattttaactctggagtggaatcaaataaccctgcataactgacggcgggagaaagcaggaaaagaagcgtaactgcttttctaaacataaataacacatccttatgattcaaaaaaacattataaaatgttgttttttatttttcaacaggatgtgcggttaaatttttatatattgatacggtaaattactgatggcttaataatatatcaggcagctgatgctgcctgatatagcgtttttacgctttcggtttaaaacgcaatagccggttggcattgctgacgacggtaatggaagacagcgccattgccgcgcctgctactaccgggtttaacaaggtaccggtaaacggccacagaataccggcggccaccgggataccaatgctgttgtagataaatgcgccaagcaggttttgtttcatattgcgcaacgtcgcgcgcgaaatggccagcgcatccgccacgcccatcagactatggcgcatcagcgtaatcgccgcggtttcaatcgccacatcgctgccgccgcccatcgcgataccgacgtccgcctgcgccagcgcgggcgcatcgttgataccatcgccgaccatcgcaacctgacgaccctggctttgcaggcgtttaatcgcatcggctttgccatccggcagaacgcccgcaatgacttcgtcaatacccgcttctttggcaatcgcgttagccgtcgttgggttatccccggtgagcattaccagacggtatccggcgttgtgcaggcgttcaagcgcggcaatactatcgctgcgcaatggatcgcgtaccgccagtaacgccgccgctttaccgtcaatcgccagcaggaccggagtcgagccttgcgaggcctgcgcggtgatttccgccgtcatgtcatccgtggcgacgtgctgttcgttcagcaacgcctggttccccagaagcagttgatgaccttccgcttcaccgctgacgcccagtccgcgcagcgttctgaaaccgttcacctgcggcagtttatcatcgccggctttttccagaatcgcatgggccagcgggtggctggagccttgttcgagcgcggcagccagacgtaatgcctgagcttcctcaacgccgttaaaggtttttatcgccaccacttgcggcttgccttccgtcagcgtcccggttttatcaaaaacgagggtatccaacgtactggcgcgttgcagggcatcggcgtcgcgtaccagcacgccgaattcggcagcgcggcctacgccggaaataatcgacattggcgtcgccaggcctaatgcgcaagggcaggcgataatcagtacggtggtggcgatgaccagcgtataaacaatttgcggcgccggcccgaagaaataccagatagcggcgctgaacagcgcaatggccacgacgacgggaacgaataccgcggagattttatcggccagttggccaatttccggtttactgctttgcgcctggcgtaccatgcgaataatgcgtgacagcgtggtatggctgcccaccgcgctggcgcggaacaggacgctgccgtcctggacgacggtgccggcatgaacgctgtcgccttcgcctttttgctgcggaataggttcgccggtcagcatggcttcatcaagccacgcttcgccttgggtaatttcgccatccaccggcacgcgatcgccggtagtgagccgcagcagcatccctggctgaacgtccgccagcgggacgcttttttcgccgtcttctgtcacgacgcgtgcggtgggcggggtgagatcgagtaatttttccagcgcttttgaggaacgctgacgggcgcgcgcttccagcatgtgtccgagattaatcaaaccgataatcatcgcgctggcttcgtaatagaggtgccgcgcttccatcgggaaccactgcggccacaggttgacgctcatggagtagagccaggcaaccccggtgccgagcgccaccagcgtatccatcgtcgccgtgccgttcagcaggcttttccacgtgttacggtaaaagtgaccgcccgcaaagaccatcaccgcaagcgtgatcaggccaatagccagccacaggctgcggttgtcgtcggtcaccatcatgttatcgccgatcatcccccagaccatgaccggtataccgaccgcaagggcgacgattgcctgccaacgaaaacgtttcatggtggcgatggcggtttcctgctggcgctcgcggcgtttgatgtcatcttcaatcgcttctgcgccgtagccggctttttccaccgcctgcactaaatcagcggcggacgcgctgcccatcaccagcgcagtgcgttccgccaggtttacccgtgcctgcgtgacgcccggtacgctttgtagcgcatgttgtacgcgggtgacacaactggcgcagctcatgccgcttaacagcaactgttggctttcttcatcggccgtcgctaccggaagctcatgaggaaccgctgccagtgcttccgacgggattgatgactccgtcagcggtttagcctttgggtggcttaacgtcgcgccatacccggcttgtttgatggtttcaattaacgcgtccgcactggcggtaccggtaacgtgcgcttcggttacggtgacgtccgccagctcaacatccggacgttgttcaagactttctttcacgcgtttaacgcaatgaccgcaggacaaaccgtccagggtcaggtcgatagtttgagacatagtaaaaactcctttatgattggtcatcaattcattgaccttagtaatcgtagtgactcactgtgataaaggttaaaccttccagcaaggttaaggtcaagggggaaatatgaatattagcgatgtggcgaaaaaaaccggtttaaccagcaaagccattcggttttatgaagagaaagggctggtgacgccgccattacgtagcgaaaatggttatcgcacctacacgcagaagcatttaaacgagctgacgttgctgcgacaggcgaggcaggtggggtttaatctggaagagtgtggcgaactggtcaatctgtttaacgatccgcgacgccatagcgcagatgtgaaaaagcggacgctggaaaaggtcgcggagatcgagcgccatatcagcgagctgcaatcaatgcgcgatcaactgttggcgctggcggagagttgtcccggcgatgacagcgccgactgcccgattattgataatctttccggctgctgtcatcacaaggcgcaaaagccacgttgattaaacggcacgaatgcgtaaggtgatgccttccacggcgatcacttcgacatgcgtacctgcgcgcaggtcttcgtcagcgcataccggccacgagctgtcgccgacacgcatatgaccccgtccgttcactaacgcggcatcaagcataaaccggcggcctaccagttgttgtccgcgttggttaaggcggctgtcggtcggcttctgttcccgcacgcgacgcgccagccagcgccaccaaagccaggccgccagcaacgttaaggccgcaaacagcacgccctgccattcccagccgagcggtaagagccagacggttaagccggtaatcactgccgccacgccgctccacagcaaatagccgttaccgccgagcatttccgcagccaacaacaggccgccgaggctaagccagaagatatgcggatgcaccagaatcatcgctatcatgcttttttccgttcgctggcgctgtccttaaccagctcgctgatcccggcgatagcgcccatcagactgctggcatccagcggcatcatgaccactttgctgttattcgccgagccgatttgctgtaacgcttcggtgtatttctgcgccacgaagtagtttatcgcctgaatatccccggcggcgatggcttcagacaccatctgcgtagcgcgggcttccgcttcggcggaacgttcgcgcgcttccgcctgcaggaaagcggactgacgttcgccttcggctttcagaatctgcgactgtttttccccctcggctttcaggatttccgcctgacgtaccccttcggcctcaaggatataggcgcgtttggtacgttccgctttcatctgggcgttcatcgaggagatcaattccgcgggcgggcggacatcgcgaatttcgatacgggtaactttaattccccacgggttggtggcttcatcgacaatatgcagcagccgcgtgttgatgctgtcgcgctgggagagcatttcatccagctccatcgaaccgagtaccgtacggatattggtcatggtcaggttaatgatcgccagttccaggttactgacttcataagcggcgcgcggcgcatcgataacctgaataaaacagaccgcatcgatagtgacgttggcgttatcttttgagatcacctcctgcgacggaatatccagcacctgctccatcatattgatcttgcggccaattctgtccataaacggtacaacaaggcttaatcccggctgcagggttttggtgtaacgtccaaagcgctccaccgtccactggtatccctgcggaacgattttgacgcccgcgccgacgatcaccagcgcgacgaaaatgagaatagggataagaatgagcatagctaaacctcctgttgcgttgtccataaaccgattttgctgacgaattaagcgaattatacctgattcagtaaagcatgttccccccttattaattacagggatacactatcgctataaaaatatgaacaacggatgcgcaataaatgacagaacgtagcatgttgcttgagttaaagcaggtcggttaccggactgcgacgacaaaaatagtgaataacatcagttttacgctgcaacgcggcgaatttaagttaattaccggtccttctggctgcggaaaaagtacgttgttgaaaatggtggcctcgttaataagccctgatatcggcgtgattctttttgaggggcaggatattactactctgagtccggaagcctatcgccagcaggtttcttattgcgctcagacgccagcgctatttggcgatacggtttacgataacctgatttttccctggcaaattcgccatcagcgcccgcagccgacagccttcgcagacgatctggcgcgttttgaactgccggagacgattctgcaaaaaccgattaccgcgctttccggcggagaaaaacagcgtattgctctaattcgtaatctacagtttctgccgaaaatactgttactcgacgaaataaccagcgcgctggatgaacataacaaacggaatgtgaatgatattattcatcgctatgttcgcgataagcaggtcgctgtcttgtgggtaacgcatgataaagatgaaattcaacacgcggataaggtgataacgttaacgccatctgccggagagatgcaggaggcgcgttatgaacgagcataatattaccaatacctcgctggcgttatcgatgctgctggtggtggtcgcgatgctcatcagtcacaaggaaaagctggcgctggaaaaagatattctgtggagcgtatgccgggcggtgatacagctcattattgtcggctatgtactgaaatacatctttggcgttaatcatgccgccctgacgctactgatggtgctgttcatctgttttaacgccgcatggaacgcgcaaaagcgcagtaaatatatcgataaggcatttctctcctcgtttatcgccatcaccgtcggcgccgggctaacgctgacggtactggtgcttaccggttcgattgaatttgcgccgatgcaggtgattcccatcgctggcatggtcgccggtaatgcgatggtagcggtagggctgtgctacaaccaactggggctgcgttttcatagcgagcagcagcaaatccaggaaaagttaagtttgggcgcaacgccgaaaatggcctccgccgggcttatccgcgatagcatccgcgcatcgcttatcccgacgatcgactcggcaaagaccgttgggctggtgagcctgccggggatgatgtccgggctgatttttgccgggatcgatccggtaaaagcgattaaatatcaaattatggtaacgtttatgctgttgtcgacagccagcctgtctaccatcattgcctgctatttaacctaccggaagttctataattcgcgtcatcagttggtagtgatgccgctcaagaaatcatgatagttgccggatgatggcgcaagcgccttatccggcctgaggacgacaggtaggccagataagcgcgccatcaggcaagagaggattaatacagtagcgcgtacaactggcggcggtatttcgacgccagcgcgtcgccggtgccgagcgcggcaaggatctcctggaaggttttgcgcgtctgtccctcggcggcggtaagatcttttctcagatggctgaacagcaattccagcgcttcttcattacgtccgacctggtgcaactgcaatgccagttgcgttgccaaagccgcatcctgcgggttgtccgcgacttgctgctgaagttgctgaatttccggcgtatccgccgcctgtttaagcagttcgatctgcgcaaccagcccctgataacgggtatcctgatcctgtagcgggatagtttttaacaccgcttcggcctcttcagagcggttcagcgcaatttgcgcttccgccagtaacaggccaatctcactgttctgcgaagagagctgccaggcgtctttgagcaacggcagcgcgtcaatgtagttgccctcctgcattaactgcatcgcttgttgcgcctttagctcttcttcgcgcggcagtactttatccagcagagcgcggatcgcctcttccggctgcggtccctggaaaccatcgaccggttggccattctggaacagatagactgtcgggatggcgcgcagcccaaactgagcggcgatcatctgttcggcgtcgcagtccagctttgccagaataaactgaccgtggtactgggcagccaggctttccagcactggcgttaattgcagacagtgttggctgcgttcagaccagaaatagaacagtaccggcgtggtcatggactgctctaaggtctgctgcaggttggattcattaatattgacaatgttctgtacggacatggcgtcgctctcttttgtctgtgtcacgtttacatgggggctgacgggcgcgcttcaactcagctttgtaaaattttatccagcatccggcccggcaatatgcgtttcagcgccatcaccgcccaggtgaccagcgtaacgggatagcgcagcctgggtttatcgcttgcaaaagcatgacgtactttcgctactaccgcgtcaggatcgcgggtgaaacgtgcggcgatgccgggattttctaccggtttatcacgctgcgtctggttaacgttatcggtaaaacgggtacgaatcggccccggttctatcaggctcactttaatgcctgtgtgccgtagctccatacgtagcgcgtcagaccaggcttcgagcgcatatttgctggcggcgtaagcgccgcgccctggggtggaaatcagccccatcaccgatgaggtcatcacaatgcgtccttcgccatgcggcaacatggcgggaagtaagcgcatagtaagctgatgcgcgccgaagaaattactggaaaactgttgctccatctgctcacggctgatggtggaaagggggccatacacgccgtagccggcattgttaaagatcccatacagacgattatcggtcagggcgatcacttcatcggcggcacgatccacgctttcaggggagtcgagatcgatcaacacgccggtaaatcccatactgttcatccgggcgacatcatcaggtttgcggcagcccgccaggatttgaaagccctggcgtttaagctcaagcgcgctgtccagaccgattccgctggaacatcctgttattaagaccgatttttgcataactttacctgtcaggatctccgttgatttaagagtcgtggttaactatatccgtcatacttcaagttgcctgtgcgttcgtttactccagtcacataggtatctatgctcctggacattctcttacgtgccgccttcatgcaactcgaatgattcaggagagaaaaggggtcaactgcttcgccatccagtcggcaataaacggctgggcgtcgcggttgggatgaatgccgtcatcctgcatccactgcggtttcagatatacctcttccataaaaaacggtaacagaggaatatcgaactctttggcgagcttaggataaatggcgctaaaggattcattataacggcgaccgtagttagcgggcagatgaatttgcatcagtaacggttgggcatcggcggctttcaccgtctgaatgattttacgtagcgtctgttcggtttgcgcaggcgcaaaaccgcgtaggccatcgttgccgccaagttccaccactacccagcgcgggtgatgctgttgcaacagcgccggcaaacgcgccagtccctgctgcgaggtatctccgcttatactggcattaacgaccgacgttttgttttgccatttatcattaaggagcgacggccatgccgcgctggcggccatacggtaaccggcgctgaggctatcgcccagaattaataaggtgtctgcggcggcggcacggaaagttaacaggatcaaaaacaggaagggcaaatgccagcggaaaacagtgttgaagttcatcgtctcaggaagtccgtcggtcagggtgagcatgagctttccatccttaccggagttgaactggttgtcaaacgcggcgaaaccattgcgctgattggcgaatcaggatcgggaaaatctacgctgctggcgattctcgccggactggatgacggcagtagcggagaggtcagtctggtcgggaaaccgcttcaccagatggacgaagaggcgcgggcgcagcttcgcgctcagcatgtcggttttgtttttcaatccttcatgcttattcctacgcttaacgcgctggaaaacgttgagctaccggccctgctacgcggtgaaaacagcggtcagagtaaggcgggggcgaaagcgctgctcgaacaactgggactgggaaaacggcttgaccaccttccggcacagctttccggcggcgaacagcagcgcgtagcgctggcgcgcgcgtttaacgggcgtcctgatgtgctgtttgccgatgagccgacgggcaaccttgaccgtcagaccggagataaaatcgccgacctgctattttcgcttaaccgcgagcacggcaccacgctgattctggtgacgcacgacccggcgctggcggcgcgctgcgaccggcggctgcggttggtcaacggtcagttacaggaggaggcatgatagctcgctggttctggcgcgaatggcgctcgccgtcgctgattattgtctggctggcgttgagtctggcggtggcctgcgtactggcgctcggcagtatcagcgaccggatggaaaaagggttaagtcagcaaagccgcgagtttatggcaggcgatcggacgctgcaaagttcgcgggaggtaccgaaagcctggcttgaagaggcgcgtaaacgcggccttaacgtgggcgagcagttaacctttgcgaccatgacgtttgccggcgatacgccgcaactggccagcgtgaaggcggtagatagcgtttatccgatgtacggcgaattgcaaacccgtccaggcggagtgaaagcgcagccgggtagcgtactgctggcgccgcgtctgatggcgctgcttaatttgaaaacgggcgataccattgatgtcggcgacgtgaccttgcgtattgccggtgaagtggtgcaggagccggattccggatttaacccttttcagatggcgccgcgtctgatgatgaatatggccgatgtggcaaaaaccggtgcgatacagccggggagccgcgtgatgtggcggtataaattcggcggaacgccgcaacagcttgctggctatgaaagctggctgttaccgcagcttaaaccggaacatcgctggtacggactggagcaggatgacggggcattggggaaatcgctcgaacgttcgcagcagtttttgctgctttcggcgttattaacgctactgctggcggtagctgccgtcgcggtggcgatgagccattactgccgtagccgctacgatctggtggcgattttaaaaacgttgggcgcgggccgggcccagttgcgtaaacttattatcggacagtggttgatggtgctggggctttccgccgtcacgggaggcgcgattgggttactgtttgaaaacatattgctggtgctgctaaaaccggtactgcccgccgatttgccgcccgccagcctgtggccctggctgtgggcgctgggcgcgatgacggtcatctctctgctggtcggtttacggccttatcgattgttgctggcgacccagccgctacgggtgctgcgccgcgatgttgttgctcgcgtctggccgttaaaaatttatttgcctgtcgcctgcgccgtcgtggtggcgttgctcgtcggattgatgggcggaagtatgctgttgtgggcggttctggcgggcgccgtgatactggcgctgctgtgcggtctggtgggctggatgctgcttaacgtgctgcgcggcatgacgttgacgtcgctaccgctgcgtctggccgtcagccgacttctgcgtcagccgtggtcaacgttgagtcagctttcggcgttttcgctttcgtttatgctgctggcgctcttgctggtgctgcgcggcgacctccttgatcgctggcaacagcagctcccgccggaaagtccgaactatttccttatcaatattgcttcagaacaggtcgcgccgctgaaagcctttttggcggaacatcaggtgatcccgcagacgttttatccgattgtgcgggcgcggttaacgaagataaacggtaatccgacggaaggtcagcaggatgagtcgctcaaccgtgaactgaatttgacctggcaggatacgcgcccggcgcataatccgctggtcgccggtcactggccgccaaaaccgggcgaagtctccatggaagaggggctggcgaagcggctgaacgtcaaactcggcgatagcgtaacctttatgggcgatacccaggcatttagcgctaaagtcaccagcctgcgtcaagtggactgggaaagcctgcggcccaactttttcttcatttttccttccggggcgctggacgggcaaccgcaaagctggttgaccagttttcgctgggagaatggcaacggcatgttaacgcagcttaaccgcgagtttcctaccgtcagcctgttagatatcggggcgatcctgaaacaggtgggacaggtgctggagcaggtcagtcgggcgctggaggtgatggttgtgctagtcaccctctgcggcatgttgctattactggcccaggtacaggtcgggatgcgtcagcgccatcaggagctggtggtgtggcgcacattaggagccggaaagaaactgttgcgtaccacactctggtgcgaattcgccatgctggggttagttgccgggctggtcgccgcgattggcgcggagacggcgctggcgatcttacaaatcaacgtttttgatttcccctgggagccggactggcgtttatggggcgcactgccgttttgcggcgcgctgctgctttccgtatgcggcggctggcttggcgttcgtttgctgaaaggcaaagcgctattccgacagtttagcggatgattcatgatgtgaataatttcgcgccggtttttaaaacggcgcgtacttttttagtcgcacaaattgataactccttgatttttagtagcacaaatcattaaaaaatacacaacacgtaaggttttataacagttattatttgcctgctaaatgatttggattggctatctatcaaggaaaatataatgacaattaaaataacagcgttggcggcatcgatcggcgcggcagtggctttcatgcctttcgccactcaggcggaaatcaccgttttaaaacaagatccccaggcgggtaatccactcagccgactcaatttcaccgttggcgggagtattcgtccgcagttccagaatatgaccggcaatgacggcgcgaacggttataaacgtaatggttttgatggcgggacgcgtttccgcttcgccgcggattattatctgtttgatgatatcagttggattagctattacgagctgggcgtcaatatccctgcggtatttgactgggataaccattatgcgaagggcgcgactgataccactcgccgtatgctgtataccggcttcaagagcgcgacgtggggaacgctgaccttcggtcaacagaacagcatttattacgatgtggtgggcgtaaaaaccgatatctgggattacgacatgataggtcaggcgccgggcaacgggattaacggcgactacgatggttcttatcgcacgcgtaagtcattgaagtataagaaaagcattggcaatgtcgatctctacgcgtcttatctgttcagcgacgattataatgccaataacggcctgaattacaagcgtaaaggcggcggttctttaggcgcggattaccatctcaccgacgatctgacctgggggacggcatggaactatacccgtgcggagatgcgcggcaacggcaataaaacttacgatcaaaatattgtcggtaccgcgttaagctggacgccggaaaactggactatcgccgcaggcggcggttggtatcagaactttatgacgaccaaaaaagtgtctgtgaatgattactttgccggcgatgcgtggggtctggaatattttgtcggttacgctttcccgattggtcagtatgccgtgaaagctattcaaccgtactttatgggcgaccgcattgaatatgtgaatggccgcgactatctgcgcaccgataacggcgtggggatcaccttccaactggattatggtttccgcgttgattatgaacatgttttcacttccagcactgacaatctgggcgatatgaacctggtgcgtctgcgttacgatttctaaagcgttttcctctgccggatgttggcgttaagacctcttatccggcatttccctttacgccattcccgcctgacacacgcctgagcgcctgcctcgtacatttaacgacacaccaggaaacatcatgaaataatttcaaggacagcaggctgtgatctgtgtcatgttaagaaatagcctttcgtttgggccaaaacagacgatgccgcatgaacggcatccggcacagcatcacactatttaaaatggagaaattatgggattgcgtcagagtttacgcattgcggccagcacgctattactggcctgcggattacagtttgcccatgccgatagttccccgcaaacgatcgtatttggcgtcgcgccagggccgtatggcgacatggtgaagcaggcgattgcgccgacattaaaagaaaaagggtataaggtcgtggtgcgcgagtttagcgactatgtccagcccaatatggcgttagctaatggcagcatcgacgccaacctctttcaacataccctctattttgacaaattcaccgctgacaaagggctgaagctcagcaaacttattgtggtaccgaccgccgggatgggcttctattcacgtaaaatcaacagcctggatgcgcttaaaaaaggggacattattaccctctccaatgatccgaccaacctggcgcgcggccttcgcttcctgcaatcgttggggcttatcacgattaaggacaatatcgatccgaccaaagcctctgaacgagatatcgccagcaatccaaaaggactggttttcaaaccgctggaagccgcacagctaccgcgcacgctggatggcgtgaccggcgcgctggttaacgggaactttgcggtggcggcaggactcgatctctccagcgcgattaagcaggaacacctggatgagaatctgaaaaatatcattgcggtacgcagtgaagatgccgataagccgtttgccaaagatattgtcgaggcggtgaaatcgccggcttatcgcgcggttatcgacgatccaaagaatatttatagcgccttccagaaaccggaatggatgaccgcgacaccctgatcgcagcggtggccatccccaatttctgaggtgaatatgattgaaatagaaaaagtctgcgtcgattttaccgccggtcgcggtacccccacgcgcgcggtggatgatgtgagcctgcatatcgccgcgggcgagatttttggcattgtcggtaccagcggcgcaggaaaaagcactctgctgcgtaccctgaacgccttaacgcgtcccagtcaggggcgcgtcaacgtcaacggcgtggaaatttcggcgctggacggaaaagcgttacgccaggcgcggcagcgtattggtatgattttccagcattttaacttaatgcatacccggacagtggcgcaaaacgtggcgtttagcctgaaagcggctggctgggaacgcagcaaaatcgcgccgcgggtggcggaaattttaacgctggtgggccttgccgataaagcgaaccgttttccggtacagctcagcggcgggcaaaaacagcgggtggggatagcccgcgccatcgctaaccatccggatgttttgctgtgtgatgaaccgacttccgctctggatctggaaacttccgccacgattctggccctgctcagacagatcaacgcacagcttgggattactattgtgctgatcacccatgaaatgaacgtgatcaaatctatttgcgatcgcgtggcggtgatgtcgggcggtaaggttgtggaatcgggcgaggtgtttgatgtgtttgcccacccgcaacacgctttcacacagcaactggtgtctcatacccttaatttgaccctgccggaacgtttacgggaacacctgcccgggcagctgctgaaaattttgtttatcggcgattcggcggagcagccggtactgtcggaggtggcgatcaagtttggcgtcgcggtcaatatcctgcatggcaagattgagtatatcggcgaacgcgcgttgggcattctggtggtgcaattaaccgcgccgcataatccaacggcggtggccgccgccgtggagcatatccgtcaacgtactgcacaggtggaggtgatccgtggatgatttattgccggatttaacgctggcgttcaatgaaactttccagatgttgagtatttcaacggtgctggcgattcttggcggtctaccgctcggttttctgatttttgtcaccgatcgtcatctgttctggcagaaccgttttatttatctcgtcgcctcggttctggtgaatattatccgctcggtgccatttgttattttactggtgctgttactgccgctaacgcagcttttgctgggcaatacgataggcccgattgcagcctccgtcccgctgtcggtggccgcaatcgcgttttatgcacgcctggtagatagcgcgctccgtgaagtcgataaagggattattgaggcggcgctggcattcggcgctagtccgatgcgtattatctgtaccgtactgttgccggaagccagcgcagggctgctgcgcggcctgacgattacgctggtaagcttaatcggctactcggcgatggccgggattgtcggcggcggcggggtaggcgacctggcgattcgctatggctactaccgttacgaaaccgaagtgatggttgttaccgtagtggcgctgattgtgctggttcaggtcgttcagatgctgggcgactggctggcaaaacgtgccgacaagcgcgacagacactaagccggctcaatgtagcgtcagccggcaataaaagtaagctattgcgcttttagccagttggcaacgtcttgccatgtgccgcgaaaaacgatattcgcggcttttttctccagttgatagcgatacattgggtcgtaatattcgttaagtagcggaaccagccatgccatatggccgtcagtgctgccgctggataattgctctgccagcgccctatccagcgtgtccgtcagttcggcaaagcgttgcaaccccagacggcggcgaatagcgaacagtccatgatgaagatattcactatacgcctgccaaccggcttcatcgccgtaggcgtgggtgaagtcgtgatgcatacggatgaaatactcttcacgcagtcgttccagacgaagcgcaaacggatcttccactaccgcaatgggggcctgcgccattctttcgcgtaaacactcaggcagatggttggcgccgatcgttcgcccttcatcttccagtacccacctttttagcgtctgacgcgcgttaattttcagcaattcaacggcaagtttgttttcaaaactggcctggctgagctgggggttcagcgtgcggccaaaagaggagccgcgatgacgcgcgagaccttccagatccacgccgttgggctgttgtcgtaccagttgcgttttgccgctgcccgtacagccgccaattaaaagtatcggtttttgcgccagttgccaggtcgcctgaattgctgtctggcgcagcgctttatagccgccttcaataagcgggcagtcaatccctgtttcttgcagccaacgttgtacgatatgtgaccgctgaccgccgcgcgcgcagcacagatacccgttggggaaacgttgatacgcggctttccaggcctcaagccgctgctggcgaatgtcgccgcaaaccagccgatgccccagcgctaacgccgcatccgcgccctgacgtttgtagcaggtgccgacggcggctcgctcgtcatccatcatcaatggcaggttgatagcgcccggcatggcgccctgttcaaactcaatcggcgcgcgtacatcaattaaaggcgtatcggcaaggaggagcgcgcgatagtcctgtgctttttgtctgtcttgcataacgtaaaacgtaaccttaaatcatcctttgcgctattttacgcgccaattcgcaaagtggcttgatttttaacagcgtaccgtgttgaaaatggataaaaaaccggctatttcgggttgccgttgggtaaataatttcacaatgtcttctaccgctttgcctccgccaaatttatgccaggcgaggcttaacggtgagggcggacgcatcgtcgggatggtacagctcaccagttcgtttttgtcgatcagcgtttgacaaagcggctgcgggacaaaaccgataccgacgcctgccagatgagcggcgattttggtttccatatcaggcacgataatttccttctgccccggaaggcgccaggctacccgcttggtcagcgtacgcgcgctgtcttcgatattaattgccgggaaacggcgcaactgcgcttctgttagaggcccgctgacgtgagctaaaggatgatccgcggacatcacaaaacgccattgtacggaacctaaagggtcgagcataaaggtattagccaacggctcggtgccagttacgccaatcgccagcgaaaaaccttcatacaggagcgaatcccagacgcccatataaatttgccgggaaaagtgaaactgggtgaaagggtaacgcgcattaagccacgataagagactggcgaccgcttgcgggctatagagcaggttattcaccacaatattgacctgacgctctacgccgtcgttaacctggcgtagctcgtcaggcatgctgtccagccacgcaagccagtcttttgcctgagagagaaggtgagagcccgccgccgtcaacgagacgcttcgcgttgtgcgaaagaacagccctacgccggtattttcctccagcagtttgatgcggtagctaatggttgccgtggttttacacaggcgctccgccgctttggagaaactccccgtttcggcaacgctgataaaggtacgcagtgtttccgggtcaaacatcgtcagacgcctccttacgatcctgataaaaccagaattgttttcctatgatttttaagtagttttacataatagccatgtttgatttgtggtctaaatctacttttggaaaaatattccaacttttatgttgatgttaaatcccgaaggttttagattgcatggtattgaaaccggacagagtccaaaccgcggttaaacggaatcgagctacaagggaaaaataatgaaacttgaggtattaccgttagatcagaagacgttcagcgcttatggcgatgttattgagacgcaggaacgtgaattttttcatataaacaacgggttagttgagcgatatcacgacctggcgaaggttgaagttctggagcaggatcgcacgctgatcagtattaacagggcgcaaccggccgcgatgcctattgtggtacatgaactggaacgtcatcctttaggtacgcaggcgtttgtgccgatgaacggcgaggcttttgtcgttattgtcgcgctcggcgatgataaacccgatctctccacgctgcgggcgtttattagcaacggacggcagggcgtcaattatcaccgtaatgtatggcatcacccgctgtttgcgtggcagacggttaccgattttctgacggtggatcgcggtggcagcgataactgtgatgttgaaagtatcccgacacatgaactctgttttgcgtgacgctattggccttcttgcataagatgaacatattgttcattgtttatgctcatattttgggccggagttaacgtaaatatgacggaagtaagacgacgcggcaggccaggacaggcagagccgactgcgcagaaaggcgctcaggcgctggagaggggcatagcgatattgcaatatctcgaaagaagcggcggcagttcatcagttagcgatatttccggcagcctggatttaccgctttctacgacgtttcgcctgttaaaggtactgcaagcggctgattttgtgtaccaggatagccagcttggctggtggcatattggtttaggcgtatttaatgtgggctctgcgtatattcataatcgcgatgtcctctcggtagccgggccctttatgcaccgacttatgctgctttctggcgagacggtcaacgtagcgattcgcaacggtaatgaagcggtgttaatcggtcaaaaggagtgcaaatcgatggtcagaatgtgcgcgcccttagggagtcgtctgccgttacatgcttccggcgccggaaaagcgctgctttacccgctcaccgaagaagagctggtggggatcgtcgtcaataccggtttgcggcggtttacgccgaccactctggtggatttacctatcctgcttaaaaatctggagcaggcgcgtgaacagggctacaccgtcgaccaggaagaacatgttgtcgggctgaattgtatcgcctccgctatctatgacgatgcgggcagcgtggtcgccgctatctcgatatcgggaccggcttcccggctgacggaagatcgctttatcagccagggtgaactggtacgggataccgcgaaagacatcagtacggcgcttgggctaaaaccccctgtagcctgagccgcatcccgctcgctggagcgggacttttttaaaatttttaaaagttggaaactttttccaataaaaagaggtagcaataaaatggcaaaaatgagagccgtggatgcggcaatgtatgtgctggaaaaagaaggtatcaccacagcattcggcgttcctggggctgcaatcaaccccttctattctgcaatgcgtaagcatggaggcattcgccatatactggcgcgtcatgtggaaggcgcttcgcatatggctgagggctacacacgtgcggcggcaggtaatattggggtctgcctgggcacttccggcccggcgggaaccgacatgatcaccgcgctctattccgcttctgccgactccatcccgattttatgcattaccggccaggcgccacgagcgcgtctgcacaaggaagatttccaggcagtcgatattgaagcgattgcaaaaccagtcagcaagatggcagtgacggttcgtgaggcggcgctggtgccgcgcgtattacaacaggcttttcatctgatgcgctcaggccgcccaggtcctgtgctggttgatttaccgtttgatgtccaggttgcggagatcgaattcgatccggatatgtatgagccgttgccggtatataagccagccgccagccgcgtacagattgaaaaggcgctggagatgctgattcagtccgagcgtccggtaattgtcgcgggcggcggggttattaacgccgacgccgcgccactgctgcagcagtttgccgaactgaccaacgtaccggtgatccctaccctgatgggctggggctgtatcccggacgatcaccccttaatggcggggatggtcggcctgcaaacggcgcaccgctacggcaacgccactctgctggcatccgatatggtttttggcatcggtaaccgcttcgccaaccgtcatacggggtccgttgagaaatatactcaggggcgaaaaatcatccatatcgatattgaaccgacgcaaattggtcgcgtgttgtgcccggatctaggcatcgtttcggacgccaaagcggcgctaacgttgctgatcgatgtcgcgcaggagatgcaaaaggcggggcgtttgccatgccggaagacctgggtggacgaatgccagcagcgtaaacggactttgctgcgtaaaacccactttgacaacgtgccagtgaagccgcagcgcgtctatgaagagatgaacaaagcctttggtcgcgatgtgtgctatgtcaccaccattggattgtcgcaaatcgcggcagcgcagatgctgcatgtgtttaaagacagacactggatcaactgcggccaggcggggcctcttggctggacaatcccggcggcattaggggtttgtgctgccgatccgcaacgcaatgtggtggcgatttccggcgatttcgacttccagttcctgattgaagagttagccgtcggcgcgcagtttaacattccgtatatccatgtgctggttaacaacgcttatcttggtctgattcgccagtcgcaacgcgcatttgacatggactactgcgtacagcttgcctttgaaaatatcaactccagcgaagtgaatggctatggcgttgaccatgtaaaagtggcggaagggttaggctgtaaagcaattcgtgtctttaaaccggaagatattgcgcctgcatttgaacaagccaaagcgctaatggcgcaatatcgcgttccggtggtggtggaagtcattctggaacgcgtaaccaatatttccatgggcagcgaactggataacgtaaccgagtttgaagaggttgcggatagtgcgaaagatgcgccaacagaaacctgttttatgaaatatgagtaagggaggtaatcgatgttacgtttctctgccaatctttctatgctgtttacggaatatgatttcctggaacgctttgataaagcggcgttgtcgggatttcgcggcgtggaattcatgtttccctacgataacgacatcgaagtgttaaaacgtaagctcagggataataatctggaacatacgttacataatttacctgctggcgactgggcggctggcgaacgtggaattgcctgtattcctgggcgcgaagaagagtttcgcgatggcgtagcggccgcaatccgctatgcacgtgcgttaggcaataagaaaataaattgtctggtgggtaaaacgccgtcaggattctccgcaacggagatccacgacacgttggtcgaaaacctgcgctatgcggcaaatatgctggcgaaagaagacattttattacttatcgaacctattaatcactttgatatgccgggattccatctcaccggcactcaacaggcgttagcattaattaaggatatcggcagcgataatatcaaaattcagtatgatatttatcacatgcaacgcatggaaggggagttaacgcaaaccatgacggcatgggccgataaaataggccatttacagattgctgataacccgcgtcgcggcgagccggggaccggggaaattaattatgactttatttttaatgtcattaaacagtctggttatgatggctgggttggctgtgaatataaaccactgactaccacggaagcgggattatcgtggattaatcagtaccgttaaaacgcagaataattcgggcagcgcttttttttccactgtgttggaaggggattgtgttgcctgaatctggaaacaccgaaagcaataaaagaggttgtatatgaaactgggatttattggcctgggaattatgggctcgccaatggctatcaatttggcacgcgccggtcatcaattacacgttacgactattggtccggtcgcggacgaactgctctcgctgggggcggtaaatgttgagactgcacgtcaggtaactgaatttgcagacattatcttcataatggtgccggatacaccgcaggttgaagacgtgttatttggcgaacacggttgcgctaaaacatcgcttcagggaaaaaccatcgtcgatatgagttctatttctcctatcgaaaccaaacgttttgcccagcgcgttaatgaaatgggcgctgattacctggatgccccggtttccgggggagaaatcggggcgcgtgaaggcactctgtcgattatggtcggcggcgagcagaaagtctttgaccgcgttaaaccgctctttgacatcctgggaaaaaatatcaccctggtgggcggcaatggggatgggcaaacctgtaaggtggctaaccaaattattgttgcgctgaatattgaagcggtttctgaagccttagtgtttgcttcaaaagcaggcgccgatccggtacgcgtgcgccaggcgttaatgggcgggttcgcctcttcacgcattctggaagttcacggcgagcgcatgatcaaccggacgttcgagcctggtttcaaaatcgcgcttcatcagaaagaccttaatcttgcattgcaaagcgcaaaagcgctggcgctgaatttaccgaatacggcgacctgccaggaattattcaatacctgtgcggcaaatggcgggagccagcttgaccattcggcaatggtacaggcgctggaattaatggccaatcataaattgtcctaattatgtgtatcgctgcggctgcagcgatacctgttcacaaggaacactctgtaaaggtgaagaacatgagtgaaactaaaaaatccggaattgattactggaaacaaattgttgtcgtaatgagtctgggctgggtagcgatttggatctatcgcaccgtgcttacgccaatttatccagaaattcaggcatctttagacaatgtaagtaatgctgaaataggcgccattgcaagtttttacttttttgcttactgcagtatgcaaatcccttgcggaatattggtcgataaattcggtcaaaaaatcatgctgatggccggatttacgctttttattattggtacactctgtatcgcgaaagccaatggcctgaccatgatctatatagggtcgctaatggcaggtggcggatgcgcttctttctttagctcggcttattcactctcttcggcaaacgtgccgcaggcccgtcgggcattagccaacgcaattatcaacagcgggtcggctatagggatggggattggcttaatcggttccagcatattagtaaaaaacatgagcatggcctggcaaaatgtactgtatatcgtggccgcgatattagtaatcatgctgtgcgtctttacgctgatcattcgcggtaaagccaaaagcgactctgcgcaagcggaaaagcaaacccaaaccgttacggaagatgagaaacgcgcgcctttattctctggtttattgtgtagcgtttacttcctctatttctgtacctgctacggttattatttgatagtgacctggctgccctcttatctccagactgaaagaggatttgatggcggagctatcgggctggcatcagcgctggtggcggtggttggcgtaccgggggcgttattttttagccatctgtcagataaattccgtaacagtaaagttaaggttattctcggtctggaaattgtggcggcagcaatgttggcgtttacggttttgtccccgaataccacgatgctgatggtcagcctgacgctatacggcttgctggggaaaatggcggtagacccgatcctgatctcctttgtatctgaacaggcttcggcaaaaagtctgggaagagctttcagcctttttaacttctttggcatgagttcagcggttgtcgccccaacgttgaccggatttatttcggatgtaacggggtcgaaagagatcagttttgtgatttcagcatgtttagtggtcaccggaacgctgatctttgctgtcgtcactttatataaaaagaaagcaacgcaacgtattgcttcagcttaaaaataattatatctactaattctttattttatatttatttgttcctcatagctaaacccataacaacgttatccgatgcgtgaaaagagggatttatggaacatcaaagagagctataccagcagcgcggttatagcgaagacttattacctaagacagaaacccaacgaaactggaaggcatttaactatttcaccttatggatgggatctgtacataacgtgccaaattacgttatggtcggcggtttttttatactggggctatcaacatttaatatcatgttggccattattatcagcgcattatttattgcggcggcgatggtaatgaatggcgcggcaggcagcaaatatggcgttccttttgctatgatattgcgaggttcttacggtgtccgcggcgcgctattccctggattattgcgagggggaatcgcggcaattatgtggttcggcttacagtgttacgcgggatcgctggcatttcttattttgattgggaagatctggccaggatttctgacattaggcggagatttcaagctgctgggtctttcactgccaggactaattacttttctaattttttggattattaacgttggcatcggttttggcggtggtaaagtattaaataaatttaccgctatcctcaatccatgtatttacattgtctttggcggcatggctatttgggcaatatcgctggtcggcattggcccgattctggactatctgccttcaggcgtgcaaaaagcagagcacagcggctttctgttcctggtggtgattaacgccgtagtcgccgtctgggctgcgccagcggtaagcgcgtccgatttcacgcaaaacgcgcattcatttcgcgctcaggcattgggacaaacattggggcttatcgtagcgtatatattattcgccgtagccagcgtgtgcattattgccggagccagtattcattatggtatggatacctggaacgtgctggatattgtgcagcgctgggacagcttgtttgcttcattctttgcggtgctggtgattctgatgacgacaatttcaaccaacgccaccggtaatattatacctgcggggtatcaaattgcggcgcttgccccgacaaagcttaactataaaaatggcgtaatgattgccagtattatcagtctactgatttgcccatggaaattaatggagaatcaggacagtatttatctgttcctcgatattatcggcggtatgcttggcccggtaatcggcgtaatgttagctcattattttgtggtaatgcgtggaaaaattaatcttgatgagctgtacaccgccagcggtgattacaaatattatgataatggatttaacctgactgcattttcagtcaccctagtcgcagtcattctgtcattaggcggcaagtttataccatttatggagcctttatcccgcgtgtcctggtttgtaggcgtaatagttgcgttcgttgcttatgcgctattgaagaaacgcacgggttttgaaaatacaggagagaaaaaactcgcaggttaaatattgaaaaagcattaagcgtatttaatgaagtgtgcgctatttaaaaactatctgtatccatacaaggagtttgttatgtcttttgatttaattattaagaacggtactgtcatcttagaaaacgaagcgagagttatcgatatcgccgtccagggcggaaaaatcgccgcgattggcgagaacctgggggaagcgaaaaatgtgctggatgcgacgggattgatcgtttcgccgggcatggttgacgcgcatacccacatttctgaaccgggccgtacccactgggaaggctatgaaaccggtacgcgcgcggcggcgaaaggcggtattaccacgatgattgagatgccgctcaatcagctgccggcgacggtcgatcgtgagacgattgaactcaagtttgacgcggcaaaaggtaaattgaccatcgacgccgcgcagttgggcggtttggtctcttataacctggatcggctgcatgagctggacgaagtgggcgttgtcggcttcaagtgctttgtcgccacctgcggcgatcgtggcatcgataatgattttcgcgacgttaatgactggcagttttacaaaggcgcgcaaaaactgggagagatggaccagacggtactggtacattgcgaaaatgctctgatttgcgatgagctgggcgaagaagctaaacgcgaaggtcgcgtaacggcgcatgattatgtcgcctcacgtccggtatttactgaagtggaagccattcgtcgcgtgctgtatctggcgaaagcggcaggttgccgtctgcacgtttgtcatatcagcagcccggagggggtagaggaagtaacgcgtgcgcgtcaggaaggccaggatgtcacctgtgaatcgtgcccgcactattttgtcctcgataccgatcagttcgaagagattggcaccctggcaaaatgttctccgccaattcgcgaccaggaaaaccagaaagggatgtgggaaaaactgtttaacggcgaaatcgactgcctggtatccgaccactctccatgccctccggaaatgaaagcaggcaatatcatgcaagcatggggcggaattgccggactgcaaaactgcatggacgtcatgtttgatgaagcggtgcaaaaacgcggtatgtcgttgccgatgtttggcaaattaatggcgaccaacgccgccgatatttttggtctgaaacataaaggacgtattgcccccggcaaagatgctgacctggtctttattcagcctgacagcagctatgttctgaaaaatgaagatctggaatatcgccataaagtcagtccgtatgttggccgtactattggcgcgcgtattaccaaaacgattttgcgcggcgatgttatttatgacatcgagcatggcttccctgtgccgccaaaaggtcagtttatccttaaacatcagcagtaatccggtgtgatttaatgcccgtcgtcacgacgggcattctctattttaaggtgtggatatgttccctgttattaaccgcgaaagtgtgttgtccggctttcagtggtttttctttattttctgtaacactgttgtggttccccctaccttgctatccgcttttcatcttcccgctgataacctgttaatgctcacacaatacgcttttttgaccaccgcgttggcctgcctggttcaggcattttgcggccatcgccgtgccattatggaagggccgacagggctgtggtggggcgctattcttacgattacgcttggcgaggcgtctcgcggcacgccgctgaacgatatcgcctccagcctgtcggtcgggatcgcgatctccgcaatggtgacgatatttatcggcattagcgggttaggacactgtctggctcgcctgtttacgccggcggtaatggtttttttcatgctgcttttgggcgcgcagctgacctcaatattttttaaaggcatgctggggctgccttttggcattgccgataccagcgccagaatcaaattggccccctttgggctggcggtcgcggtgatgtgttttatcctcgcgatgattattttcctgcaacagcgtatctcccgttacgcgttactggtagggaccgtggtcgggtgggggctatggcggttatgctttccttcatcacacttaccgccgggtgaattaagctggcgatggtttcctctgggcagccacggcacgctgatgccgggtattattgtgacggcggtgatgacggggttagtcaacatcagcaacacttacggcgccatccgcggtaccgatatcttttatctgcatcaagggtcgggcagttctcgttatcgccgaagctttatgatttccggactgatgacgttagtgacggtgcctttcgcggtcgtgcctttttcgccttttgtatcttccattggtttattaacgcaaaccggcgacagttctcgcaaatcctttatctgcggtagcgcgctgtgtctgctggttgccattataacgccgttaacccgcttattttgcgctattccactggcgatcagcagcgccgttatgctggtctcttatttacctttactttattccggtttggtttttagccagcaaattacgtttaccgcgcggaatatttatcgcctggcattaccgctttttgtcggcatttttttgatggggcttcctccggtctatttacaggatcttccactgatgattcgtcctctgcttagtaacggattactggtgggaatcttactggcagtgcttatggaaaatcttattccgtgggaacgcattaaataacatgagaaaacaaggagacatgatgaagattgtaattgcgccagattcatttaaagagagcttaagcgctgataaatgctgtcaggctattaaagcgggattttcaaccgtatttcctgatgcgcgctatgtctgtttaccgatcgccgatggtggagaaggaaccgtggacgcgatggtggcagcgaccggcgggaaacgggtttctgtggacgttagcgggccgatgggggaaaaagtaaacggattttatggcctgaccggcgacggcaaaacggcgattattgaaatggcggcggcgagcggattgatgctggtggcgcccgaggcgcgtaatccgctgctggcatccagtttcggcaccggcgaattgattcgtcacgccctggacgcggggattcgccatattattctgggtatcggcggcagcgccacggtggatggcggaatgggagtagcgcaggcgctcggtgtgcgttttctggacgcgcaaggaacgccgcttggcgccggagggggcaatttatcgcgcctggcgagcattgacctgcaggggtgcgatccgcgaatttcagagtgtcgtattgaggtcgcctgtgatgttgataacccgttggtagggccacgcggcgcggcggcggtattcggtccgcagaaaggggcgacgcctgaaatggttgagacgctggaaaatggattacgtaattatgcccgtgttttacatgccctgaccggacgcgacatgtctcaaataccgggcggtggagcggccggaggaatggggattgccgctatcgtcttcctggaagcggaaatgaagcccggtattgagattgttatgcaggcggtgaagctggaggaggcggtaaaagaggcctcgctggtgattaccggagaagggcgaatcgactcgcaaacggcgggaggaaaagcgccgataggcgtcgcgtcagtggcgaaacggcatcatgtcccggttatcggcattgccggcgtactgggcgacggcgtggaagtggtccatcgccacggtattgatgccgtattcagtattttgccgcggctggcgcctttgccggaagttctggcgaacggtgaacaaaatctctaccacagcgcctgtaatattgcccgcgtcatcaaacttggccaggacatcgggactcgttaagcataaaaaaagccacggttctcaccgtggcaaaatccaacatagctaaattaaaaataatcaggagggctgcccgccgttaaatcataacgtcgcggttacagtctttggagtagatgtagctgaatgcttcgccacgacctacaccgtatccggcctgcagggaataagcacccatgaagatgtagtcgccttttttcaccggcacccagttgttgtcgaggttataaaccccctggccggaaaggatataagcgccatgttcctggacgtgggtttcaatatagccgtggctggcgcccggttcgaacgacagaatatgcatattcatatcgaagcccagctctttaggcaggaaatccagcagaataacatcttccatgccttcataatgaatacgctccagctggctggcattgccggaaaccaaccacggggcatgcccctcgacaggagtatagcggcgtttatataaaaatagctggctgtcttccgtttgagcgttgctaaaggtcatcatctcgcccggtggacaatagaggtatccgccctgggttaaagagaatgtttttccttcagctttagcttcaatatttcccgcaatgacatagagaaaagtttcaatcccctcgccgccaaagccctgctggttgccgccattctgatgtaaggtgaccagataatcgacgaaagaagcacccagcttcggcgtcgaaaggatggtgacgtcacagttttcaaagccgggaataatatttttcaccagaccgtccggcgttaagagcgcatagttaccgtgtttcacaatggcgcggttcgccagtaaatcatcgcggtaacccgtgacgttattcagatatcccattgatggctccttatttttgccaggcaagttgatgcagcattaatgccagagttttgaccccttcagcaaggtcattaatgttggtacgttccgccgggttatggctgataccattaatgctggggacgaaaatcatacaggtagggacgcgcggcgcgaaaatttgcgcgtcatgacctgcgccgctatgcattatgcgatagttcagttgttcggtttcacacagcctggtgagggccgcgaccagttcggcgttcatcggcaccggcgcttcgtccatccacaaatcgatatcgatgctgatatccatttcatcgcagatggcgcgcatatcgttttccaactgttcggtaaattcgcgaagtacggcggcgtccgtatgccggcaatcgattgtaaatgtggtttttccagggactacattgaccgtattcggctgcggctcaactttgccgaacgttaataccaggggatcgccatgctgtttggctttttcaatggactgactgcaaatacgactgaaggcgtgcaccgtatcgcgacgatagcccattggcgttgtgcctgcatggttggactcgccgttgagcgtcaccgtgtagcgacgttgcccgacgatggcgttgacgacgccaatcgactgtccgttgctctccagaacgcagccttgctcaatatgcaattcaacaaaggcgcggatatcggttcgcgcagcgagcggcgcggcgggaagggtaaatccgcacgcctgcatagcgtcgacaaagcctgtgcctttggcgtcctggatatggcgtacctcttcaggattcgccaggccaaaaatgttcttgctgccccaaaaaacgtaagggaaacggctgccttcttcctcagccattgacactacctcgacggtgcgcagcggcgcgccgtaggtcgcttttagccagtcgagcgccagccaggcggcaagcgcgccgaattgcccgtccagattgccgccgttgacgaccgtatcaatatgcgaaccgcttaaaatcacctgctccggaaattgtgtgccgcaaaggcggccatataaatttccgacgtcatcaaagcgtgtctccagaccgctttctgccattcgctttttaaactgctgctgtgtttccagccactcaggcgaataaagtaaacgcgtcattccgcctgtaggatcggctccaatggaagagagccagggcaatgtttcttctatcgcgtggcgaaaatgctttatcatagaaaattcctgtttcaataattattgggcaaagggattttttgtttcgtatgacttgagatagagggcatcggaaatcagatattgataaatatcatcaacaatatcgataccattcatatcggcatttttctgtttaatatcctgatcctgtccaggataataaacctgtttaaaaccgggggcgggcttcacggcattgagttcctgcatggtctgactaatatgtttgcggaataattcacaggaagaaaagaacgccggattaatgaccagatgaagttgtcctaaattgcgtccggcgtgtaaatcttcatacatcgaactgacctggcggccaaacggcagccccagcagaataccggacagaatatcgatcatcatcatcaggccgtaacctttcgggcctgcggcgggtaataacgcattgacggcaaaaggatcatgtgtcggcgcgccatttttatcaacggcccaactctccggaatggactcattgcgggaccgtgcatcgaggacttttccccaggcctgcacggtggtggccatatcaaaggtaatgatgtcatcgccttcgcccggcgcggcaaaggccagcggattagtgccatagtaaatatccgccccgccaaacggcacgaccataggatcggactgacagatagacagaccaatcaggccttcgcgagcagcctggcggacgaaataagagatggcgccgctatggcccattctgctaatgccgacaaccgcgacgccattttttttggctatttcaatagcatgctccattcccattttggctgcgacctgtccggcagcattatcggcatgcagtatcgccgtacagggaccggtattctcaatgcggaacgtcggctcccggttggtgccgccttttgaaattcgttcggcataatattcaacgcgtacggcgccatgtgagtgaatacctctggcatctgcataaaccagtacgtcggcgacgatggcggcgtgctcacgttttagtccggctttataaagcttattttcgataagctgatggagtgtttcccgactgattttcatctgtcttcctttttaacgacggtgtgaagcatgactgcgattaacataccgggaaaataaaatgattatgtgatccagacaggcaaaaaaatataattagaatttatttgataatcaggcgggttttatctttttgcttaaataaaaagcttttttagaaaatcataactaatcctttagccgttgtttgaattcttttgttaataaatttgatgtgacgttaatcactctatttaccctcccggatatataccgtgaagcgcacattaacactgctcgtgcaattgcaatgggtgcaattgcaatgggtgcaattattaaggagttgttatgatccacgcctttattaaaaaagggtgttttcaggactctgtcagcttaatgattatttctcgaaagctgagtgagtccgaaaatgttgatgatgtatcggtaatgatgggaacgcctgcgaataagtcgctgctggaaactaccggtttctggcatgacgattttcatggcgctacgcccaatgacatttgcgtggcgattcgtaccgaagcggtagatgacggcattacgcaagtgattgtgcaacagctcgaagaagcattgcagcagttggcgcagggaagcagcggcagccagtcgttaatccaggtcagacgctgggaaagcgcctgtcagaaactgccagaggcgagtctggcgctggtatcggtggccggcgaatatgcggcggaactggcagagcaggcgctggatcgttcgttgaacgtgatgatcttctccgataatgtcacgctggacgatgaaatcagactaaaacgccgggcgcgtgataaaggactgctggtcatggggccggattgcggcaccgctatgatcgccaatacgccgctggctttcgctaacgtcatgccagagggcaacatcggggtgattggcgcttccggcaccggtattcaggagctctgttcacagattgcgctggcgggggaagggattacccatgccatcgggcttggcggacgcgatttgagcgccgaagtcggcgggatcagcgcgctaacggcactggagatactcagcgcggatgaaaagagccaggtgctggcctttgtctccaaaccgcctgccgatgcggttcgtcagcatattatcgcggcgatgaaagccgccgggaaacccgttgtagcgctgttcttagggttttcctcccccgttgcgcgtgaggaaaacgtctggtttgcctcgacgctggatgaagccgcccgactggcatgtttattgtctcgcgtgacgtcgcagcgtaaagaaatggtttcaacaggcggcgtgattcgtggtctctataccggcggaacgctggcggcggaagcggcggggctgctggccggctatctgggcgtcgcggcggatacggaacatcaccatggcatgatgcttgacgctgacggccaccagattatcgatctgggcgatgacttttataccgttgggcgaccacatccgatgattgacccggcgttacgtaatcagcttatcgccgggcttggcgcacagccgcaggtacgcgtgttattagtggacgtcgttattggttttggcgcgaccgccgatcccgccgcatcgctgattcaggcctggcagaaggcatgcgacgcacgcgccagagaccagccgctgttcgccatcgcaaccgtcaccggaacggaacgcgatcctcagtgccgctcgcaacaaatcgccgcgctcgaagatgccggcatcacggtagtggattcccttcccgaagccactctgttggccgcggaactgattcgacccactctctcttctactcatccatcagccccccggttactggaagcggtggcggtgattaatgccgggttacgtagcttcgcgctggatttacaggctgccggtatgcccgtggtgcactaccagtgggcgcctgtcgctggcggtaataaaaaactggctcgtctgttagaacgtttgcaataaggggttcccatgtttacatcagtggcgcaagccaacgctgcagtcatcgaacaaattcgtcgcgcacgtccgcactggctggatgtgaagccagcttcttcattaattagcgtgctcaatcaagggaaaacgcttcttcatgccggcccgccgatgcgctggcaagagatgaccggcccgatgaaaggcgcctgtatcggcgcatgcctgtttgaaggatgggccaaagatgaaatgagcgcgctcgcgctgttagagcagggaaaggtcaactttattccctgccatcacgttaacgccgtggggccgatgggcggtattacgtcagccagtatgccgatgctggtcgtggaaaatatcaccgacggcaatcgcgcgtactgcaatctcaacgaagggatcggcaaagtgatgcgtttcggcgcctatggcgaggatgttcagcaacgtttgcgctggatgcgcgatgtgctgatgccggtattaagcgcggcgctgggacgtctggagcgggggctcgacctgaccgcaatgatggcgcagggcattacgatgggagatgaattccaccagcgcaatatcgcctcttccgcattgctgatgcgcacgttggcgccgcatatcgcccgtctggaacacgataagcagcagatagcggaagtgatggattttctgagcgtcaccgatcaattcttccttaatctggcgatggcctactgtaaagccgccatggacgcgggcgcgcagattcgcgccggcagtattgtgacggcgatgacccgcaatggcgatatgtttggcattcgggttagcggtctgggcgaccgttggttcaccgcgcctgttaatacgccacaggggctattttttaccggtttttcgcaggatcaggccaacccggacatgggcgacagcgccattactgaaacgtttggtattggcggcgctgcgatgattgccgcgcctggcgtaacgcgttttgttggtgccgggggaatggaagcggcgaaatctgtttctgaagagatggctgaaatttatctcgaacgcaacatgcagctacaaatccccggctgggattttcagggggcctgtctgggactggatatccgccgcgtggtcgagaccggaattacgccgctgattaacacgggtatcgcgcataaagaggcggggattggccagattggcgcgggaaccgtccgtgcgccgctggcctgtttcgagcaggcgctggaagcgctggcggaaagcatgggcgtaagttaagagagcgtctcatgaaacgtatccatcctcttatggcaagccgacaatcggcggattatcggcaaccctggcagatgtcaggggtatggcgtcgctctattaattttgtggcgaaaagcggtgagttattaacgcttcaccgtcgggggagcggcttcagtccgggagggtggatactgcgcggcggcgattttgacgccttgcgcgatgtgctcaccgatggcgaaaaaccgcagtcaaccgctgccggtattcagattggcgagtttcttttatgcgagccggagaggcgctgttcgctgcgggttccacgctatcttgcgtcgccgcgtcttaacgcgacgtacatgcagcgtagtgaggagacggggctgtttgggccgttaaccgtcgccgcagctcagcctctatgtccggaacttcgccagttttgtcactgctttcagtcggcgcttgcaggtgctgcgactgactggcggctatggctgggtaaagggccgggcttaacgcccagtcatgacgacacgctgacgggaatgttgctggcggcctggtattttggcgccatagatgaacgcgccgggcgtaatttttttgcccaatccggcagccttgatcgggcgacgacgctcgtgagcgtcagctatttacgctatgcggctatggggtatttcgcgtcgcctttactccactttattcatgcgctgcgacgagatgctcgcacagaaacggcgattgacggactgctggcgctggggcacacctctggtgcggatacgctgctggggttctggcttggacaacaaatagtaaaaggatagggaatgaaaacgttggtagttgctcttggcggcaacgcattattgcagcgcggagaagcgctaacggcagagaatcaatatcgcaatattgccgacgcagtgcctgcgctggcgcgacttgcccgctcgtatcggctggcgatagtacatggcaacggcccccaggtcggcctgttggctttacagaaccttgcctggaaagccgttgagccttatccgctggatgtgctggtggcggagagtcagggcatgatcggctatatgctggcgcaacgtctggcgcttgaacccgatatgccgccggtgactgcggtattaacgcgaataaaggtatcggcggacgatcctgcttttcttgaaccggaaaagtttatcggtcccgtttattcgccagaagagcaaatggcgctggaagcgacttatggctggcatatgaaacgtgatggaaaatatctgcgccgtgtcgtcgcttccccggcgccgcgtcagattatcgaaagcgccgctattgagttattgctaaaagagggccatgtggtgatttgcagcggcggtggcggggtacctgttgccggcgaaggcgaaggggtcgaggcggtgatagataaagacctggcggcggcattgctggcggagcagatagcggccgatggtctgatcattttgacggatgcggatgcggtgtatgaacattgggggacgccgcagcagcgcgctattcgtcaggcttcgcccgatgagctggcgccgtttgccaaagccgatggcgcgatgggaccgaaggtgaccgcggtaagcgggtatgtgaagcggtgcggaaagccggcatggattggcgcgctgtcgcgtattgatgataccctggcgggcagggcgggaacctgcatctgtctgtgatcgcgacgggcggcaacagagaatgcgccgcccacgctgtttatttaagcttactttgcgcccagataatgccgctggcgtattcgcctggcaggagcggagagagcgcttccagggtggcgctaagacgtgacgtatcgctgtcggtcagattcagatggccgacttttcgccccggacgtaccgctttatcataccagtgcagatgtaccagcggcagcttcagccagtcgtaattcagctcgctgccgatcaggttgatcatcaccgacggggcgttaatcaccggcgcgggcaacggcaggccggtaatcgcgcgcaaatgcaattcaaactgactgatgctggcgccattttgcgtccagtgtccgctgttatgcacgcgcggcgccagttcattgattaacaggccttccggcgtgataaaacattccatcgccattacgccgacgtagttcagcgcctgcataattgctgacagcatcgattccgcctgctcctgctgttcggcgttcgcctgtgggaacgcgacgctggtccgcaagatgccgtcctgatgcaaattgtgcgttagcgggtaaaacacggtactgccgtcatgagcgcgcgcgccgactaacgacacttcgccggaaaaatggataccgcgctcaacaatacattcgccatagcagtcatccggcagttgcccggtttcgtccgcgcgtagacgccactgcccgcgaccgtcgtagccgccaacgcgacgcttaataatcgccagttcgcccaggcggtcaaagatgccggaccactcgtcggtgctggtcagcagctgccacggcgcggtcgcgagtcccagtttatcgaaaagctgtttttgtgtcagacggtcggcgatgatcggaaatacatcgcgattgacgaaggccgggtggcgcgccagctcgcgggtaagcgcggtttccggccagcgctcaatctctgcggtaatgacgctctgctgtaccggcacggcggtaggctctgcatccagaccaaccggccagacggcgatacccagcggttcgcccgcctggcgcagcattcggcccagttgtccgttgccgagaacgcaaacttgcttcatagcgtcccccgcggatcgggattttccagaacttcatcggtttgcgctttgcgccagtcggcaatgcgctgatgcagttccgcgtcgtgttgcgccagaatctgcgcggcgagcagggcggcgttagcggcaccggctttaccgatcgccagcgtacccaccggaatgccgcgcggcatctgcacgatggagtagaggctatccacgccgcttagcgcagcgctttgtaccggcacgccgagtaccgggaccagcgtttttgccgcaatcattcccggcaggtgcgccgcgccgcccgcgccggcaataatcacttgatatccgttctcttccgccgtttcggcgaagctgaacagtttatcgggggtgcgatgagcggaaaccacttctacatggtgcgggacatccagaatttcaaaaatttcggcggcgaattgcatggtagcccagtcgcttttggaccccatcacgatggcgacacgcgccggattattgcgggaagacatgcgtcttaaaactcctgtggtgcgggacacgctgcttttgaggtgtcagagaatagcatgataatcaggcaaggaaaacggttgcgtgcgcgccgtaacggacgattcgacgaacatttacagggggaaggcgattaactcaacgttgtccggcgtgacttttaccattgaaccttcatgatgccatgcgcctaacaccacgcggaatgcgggctggtcgttggcggaaagttcatgcaccgccgggcggtgggtgtgaccgtgaatcagccactgtacgcggtgtttttccatttcggcgacgacggtctgcgcattgacgtccataatatccagcgatttgctgctgttggcggctttactgccggcgcgcattctggcggcgatacggcggcggataaacagcggcagggtaaggaacagtcgttgcacccacggattatggactttggcgcgaaacgcctgatatccggcatcatcggtacagagcgtatcgccgtgcataatcaacacattgcggccatacaggtcgagcactttttcctgcggcagtagaatcatgccgctttcgcgggcaaagcgtttgccaatcaggaagtcgcgattaccatgaataaagaagcaggggacgccggaatcaaccagcgatttaatggcaacggccatttcacgatgtagcgggttggggtcgtcgtcgccaatccaggcctcgaagagatcgccaagaatatacagcgcgtcggcctgacgggcttctacggctaaaaaacgcagaaaaccggcgacgatcgccggttcttccgtttgcagatgcaagtctgcaataaacagtgtcgccacgattactcgctgacggtcacgttttcaatgatgacgtcttcttttggtacgtcctggtgcataccgctacggccagtggcgacgcctttgattttatctaccacgtccataccttctacgacttccgcaaagacgcagtagccccagccctgcagactttcgccggagaagttcaggaagtcgttgtctgccacgttgatgaagaattgcgcggtagccgagtgtggtgcctgagtacgcgccatcgccagcgtaccacgggtatttttcagaccattgttggcttcgtttttgatcgcctctttggtggctttctgtttcatgcccggctcaaagccgccgccctgaatcataaaaccgttaatcacacggtggaaaatggtgttgttgtaaaaaccttcgcggcagtagtccaggaagtttttaactgtttcaggcgctttatcatcaaaggttttgattacgatatcgccgtgattagtgtggaaagtaaccatttttgcatcctgttccaagagagtggtgctttagcccgcaatggggcacatataggggcttgttatagcataaccgtaagctgcgatcaccttgcaaagtgtgctgcttcgattacgaataatatgtatcatacggagattattacccacacacgtctatacggaatcttcgatgttaaaaatttttaatacactgacacgccaaaaagaggaattcaaacccattcatgccggggaagtcggcatgtacgtgtgtggtatcaccgtttacgatctctgccacattggccacggacgcacgtttgtcgcttttgacgttgtcgcgcgctatttgcgttttctcggttataagctgaagtatgtgcgtaacattaccgatatcgacgataaaattattaaacgcgccaatgaaaacggcgaaagttttgtcgcgctggtcgacagaatgattgcggaaatgcatcaggacttcgatgcgctgaatattctgcgtccggacagcgagccgcgtgcgacgcaccatattcaggaaattatcgagctcacccgaaccttaatcgagaaagggcacgcctatgtggcggataacggcgatgtgatgttcgatgtaccgaccgatccgacttatgggcagctttcccgtcaggatcttgagcagcttcaggcgggcgcgcgcgtagatgtcgttgacgtgaagcgtaacccgatggacttcgtgctgtggaaaatgtcgaaagagggcgagccgagctggccgtcgccgtggggcgaagggcgtccgggctggcacattgaatgttcggcgatgaactgcaagcagttgggcaaccattttgatattcacggcggcggttccgatctgatgttcccgcaccatgaaaacgagattgcccagtctacctgcgcgcatgacggcgaatacgtcaactactggatgcactccggtatggtgatggtggatcgcgagaagatgtccaaatcgctgggcaacttctttaccgtgcgcgacgtgctgaaatactacgatgcggaaaccgtgcgctacttcctgatgtccgggcattaccgtagccaactgaactacagcgaagagaacctcaagcaggcgcgcgcctcgctggagcggctatacactgcattgcgtggaacggataaatcagcggccccggcgggcggcgaggcgtttgaagcgcgtttcgtggaggcgatgaatgacgatttcaataccccggaagcctactccgtcctgtttgatatggcgcgtgaagtcaaccgtctgaagggcgaagatatgaccgccgcgaatgcgatggcgtctcatctgcggaagatttccggcgtgctgggactgctggagcaggagccggatgttttcctgcaaagcggcgcgcaggcggatgacggtgaagttgcggaaattgaagccttgattcaacagcgtctggatgcccgtaaagcgaaagactgggcggcggcggacgcggcgcgcgatcgtctcgctgaaatgggtattattctggaagatggcccgcagggcaccacctggcgacgtaagtaagcgcttttacaggccgctctatttgcatagaacggcctgttttttattttttcgcaccgggcgaaagataaacacacaccgactcccccagattctgatgttcacacccgggtattgcccggctgtaatgggcaataaagcggatgacgctgtcgccgctgtttagccccacatttccttttcgcagcaattctgctggctgatcgtcggtgaaaacgttaggggtgaacagttttgcgcctaatcgttcaaaagtgccagcactaacgatagagggttgataaccctgaagctgcaaccagcggcgggcatcattacgtgaccaaacctgcgcatcgtttgctcgcgcaaacacttcgagaagccagccattcgaattctgataagggccggaaaaaggccacgcaattaggttatagcggggactgtggaagagattgagtttgatagcgctatgtaagagcgtttgtaatgccgtcgcgatatctgaacgcgggcgcaaaacggcaatgctctgattcaccaggtcatcagccagaaactcatacagaccttgtatatagagcgctgattcagcggttccgcaagtattcagattatggtaaacccgccagtctccgtttggctggcgcatggcatagccagcatgtgaccaggttaaatgtcggctcgacatatcttgcccctggcgaaccagaatgacgaccggatcgggttgactgttaagctgttgtttgagctgtagcgcctgatccattgtcgctgcgatgctctccggcgtgtttgctttttggtgacagttagcactgtctgcataagcgttgagcgagattgcgctgagccacagggcaaacgcgaaccgcttcatttggccggtaccgtctggttgctggaaagtcctgcgtcgtcctgatttaccatatgggcaaggactttgccctcttttttcaaataagcgccggtgccttcctgcgttttttccagagtgactttatcacctgctttgaggttgccttctttgacgacatgtagcggaacttgcattttaatgtctttgttatcgggggacttagtggttaacagcgcggttttttgctttttattttcgacaacagatccaatgctcaggttgagcggcagcagtacgggggagagtataattccgctaaccagtgcggaactgcccacgctgacaaccgcagacgatgccgcataccagccagtggcagacatttcttcgctatagctggcgtgggaaaatgagaaacagatgaccgcggcggcgaatgtcattttattcatattgattccttttaatatgcgttttaagtacccatagaaataacactaaaatacttcccggcaaccacacccacagcaattctgagagaatgacctggtgtccatacggcgtgatgtagcttgaaagcgcgaacggcgcgactttaatcacctgccagggcgcaaaaaaacgttcatctgaccacggccacagccagccaacgcctttcccacccgtggttatcgaatccagcaggctgtgcgacaacaatgaaacggttaaaaacagccagcagcgcacctgcccagctcgaaaccatcgtcgtcccgcgagtacgcacaacagggggaggacgaatgcgaaaagtaaagagtgggtaaatccgcgatggccaaatacgttgccgtaggcgacgccaaatttaaaggccagcacgtcggcatcggggagcatcgccagcacaacaccggcaaacagcaggcgaggagggataactttcaggcctaagcctgcgccaaaacacaggggaacggcggcgtgggtgataacggtaggcatagcgatcgttcacagggaaatagccatgctagcagttggaacgcagaggattaagtggatgattatctgaaaagacagcgtaatcaggccggataagacgctttgcgtcgctatccggcactctgtatcaggccacgacgttcacactttggccttcaaagctaacggtttgcccggcgacaattttgcagcgtttacgcgtttcaaccgcgccatcaaccttcaccaacccgtcggcaatggcgattttcgcctgcgcgccgctttcgctccagccttccagcttgagcagatcgcacagctcgacgtgcgggtgcttgcctaaagagaatgtcgccatattattttccttgtggatcgtgatattcaatgcacgcctgcagcgtgttttcgataagcgtggcgaccgtcatcgggccgacgccgcccggtactggcgtgatgtatgacgcgcgcgccgcggcttcgtcaaacacgacgtcgccaacgaccttgccattttccagacggttaataccgacatcaatcacaattgcgccttctttaatccattcgccgggaataaagcccggtttacctacggcgacaatgagcaaatcagcatgctcgacatggtgacgcagatctttggtaaagcggtgcgtaacggtagtcgtacagccagccagcaacagctccatgctcattgggcgtccaacgatattggacgcgccaatgaccaccgcattcaggccgtaggtatcaatattgtaacgctcaagcagcgtcacaataccgcggggcgtacagggacgcaggcgtggcgtacgctgacacagacgaccgacattataaggatggaaaccgtctacgtctttatctggcgcgatacgctccagcactttaacgttgtcgatacctgccggtaaaggcaactgcaccagaataccgtcaatcgtgttatctgcattcagagtatcgataagcgccagcagttcggcttcgctggtggtttctggcaggtcataggagcgggagacgaaccccacttcgtcgcacgctttacgtttgcttgcgacataaatctgtgaggccggattgctgccgaccaacaccacagccaggccgggagcgcgaagacctgctgcgacgcgtgcctgaactttttgagcaacctcagatcgcacctgctgcgcaatcgttttaccgtcaataatctttgctgccatcagagagaagattccatctgttacttcaagtcaaaggggatgacgctattttgtcagaagcgggcctcgctgtcagttaacgtttgtgtttccgatgcaaacgcgacgtctcccccgtctgttgacgatactgagacgtggcccgtaagcgcgccatgattaaccaaaaagaaacaattcatcaccctggctatggttaccgtaatccctcgtcgttaatagcatcgggcggcataatgcgacattttatacaaaataagattagacccttcttatatcccaataagaattagcttaggtcattaaaagagtttgcggctattttttatttagcgaaatgtttaatttattaccgtgacgaaatgtcatattcgcaaagattaattactgcgtctgatactcaggggagaaacagaaaactaattaatctgcgatatctatctttacaggatgcagagataacttttctgacatgctatgtcgataataattcaaacggagccgacaggatgccgaaaccgggtgtgtgtaattcaagggaaatccatgaaacataaattaatgacctctactattgcgagtctgatgtttgtcgctggcgcagcggttgcggctgatcctactccggtgagcgtgagtggcggtactattcatttcgaaggtaaactggttaatgcagcctgtgccgtcagcactaaatccgccgatcaaacggtgacgctgggtcaataccgtaccgccagctttacggcgattggtaatacgactgcgcaggtgcctttctccatcgtcctgaatgactgcgatccgaaagtggcggccaacgctgccgtggctttctctggtcaggcagataacaccaaccctaatttgctggctgtctcctctgcggacaatagcactaccgcaaccggcgtcgggattgagattcttgataatacctcttcaccgttgaagccggacggcgcgaccttctcggcgaagcagtcgctggttgaaggcaccaatacgctgcgttttaccgcacgctataaggcaaccgccgccgccacgacgccaggccaggctaatgccgacgccacctttatcatgaaatacgaataatcccgtcagggaacgccagggaagggaggcgcctcaacggaagaggctatcggggataaatagagaacatagcagatgataaggaaaggcgcggcgctagcggggcttgttttgatgtcgcccgtcattgcgcagccggtaatggtggagagcgggcgtgttcacctgcgcggacaactggtcaatggcggctgcgctgtcgccacagaaagccagaatttgcgcgtattgatgggacagtaccgcacgaatgcgtttaccggtcctggcagcttcgctcccgtcagcgttccattttcgttacggttaatctcctgtagcgcggaggtctggcgtcatgtcggcattgcgtttgccggcgttacgcctgcggaagatccccatgtttttctggccagcggcgagggtatcggtaatgccggaatcggcctggcattatttgatgaccagcagcggcaaatcatacctaacacgttaccgcttcattacacgcccattttaacgtcagaaatgactttgcattttactgcccgctatcgggcaatttcagaaaatatgacgccgggacgaattcattcagaagtgtggtttacgctggtttacccatgaattttcttgccgacgtgactcaatgcaaaaggtattttttaccatgctgaatagtataaaagtaggctttattgttcttctcacgttatttacttcgctgaacgtacaggcggcgggggggattgcattaggcgccacgcgcgttatttatccctcggcggcgaagcagacttctctggcaatcagtaatagcgatactcaagaacgttacctcgtcaattcatggatcgaaaataacgctgggcagaaagaaaaaacgtttatcgttacgccgcctttattcgtcagcgagcccaaaagtgaaaacacgctgcgtattatctacgccgggcaaccgctacccggggatcgggagtcgttattctggatgaacgtgaaagccatcccgtcggtcgataaaagtcatattgaaggaaaaaacgttctgcaactggcgattctgtcgcgcatcaaactgttcgtgcgtccggcgaatttgccgcagacgccggaagacgcgccgaccttgctgaaattttcccgtgtcggcaaccatctcaagataaccaacccatctgcttattacctcacgctggtcaatatcagcgtgggcgcgaaaaagattgataacgtgatgatcgcgccaaaaagcgacatgcaaattcccttaccgactggcgcgcagggcaacgtgacatttcagtccgtcaatgattacggcgcattgacgtcggcgacaacggccagtctcggttaagcagagagcgtgaagccacacgagaacacgatgaagaagacaacctggtttgcagggcgatttcccggctatgtatcaccgttaagcagcgtggcgctgtcggtgctggcggcgctgtgtccgctgacgagccgcggcgaaagttatttcaaccctgcgtttttgtcggcggataccgcgtccgtggcggatttatctcgctttgaaaaaggtaatcatcagcctcccggtatttaccgggtggatatctggcgtaacgacgaattcgtagcgacgcaggatattcgttttgaggcgggcgccgtgggcaccggcgataaatccggcggcctgatgccttgttttacaccggagtggattaaacggctgggcgtgaataccgcggcgttccctgtctcagataaaggcgtcgataccacgtgtattcaccttcctgagaaaatcccgggcgcggaggtcgcgttcgatttcgcgtcgatgcgcttaaacattagcttgccgcaggcgtcattgctcaacagcgcgcgtggctatatcccgccggaagagtgggatgaagggatacccgccgcactcattaattacagttttaccggtagccgcggaacagacagcgatagctattttttgagtctgctgagtggcttgaactatggcccctggcggttgcgtaataacggagcctggaactattcgaaaggggacggctatcattcgcaacgctggaacaacattggcacctgggtacagcgcgccatcattccgctaaaaagcgaactggtcatgggggacagcaataccgggaacgatgttttcgacagcgtcggctttcgcggagcgcggctgtactcttctgacaatatgtatcccgatagcctgcagggctacgcccccacggttagaggaatcgcccggacggcggcaaagctgacgatacgacagaacgggtatgttatctaccaaagctatgtgtcgccgggcgcgtttgcgattaccgatcttaatcctacctcttccagcggcgaccttgaggtgacggtagatgaaaaagacggtagccaacaacgttacacggtgccttactctaccgttccgctattgcagcgtgagggcagggtgaagtatgacctggtggccggggattttcgcagcggcaatagtcagcagtcttcgccattctttttccagggaacggtgattgccggcctgcctgcggggctgacggcttacggcggtacgcaacttgccgatcgttaccgtgccgtggtggtcggggcggggcgaaatttgggcgactggggagccgtgtcggttgatgtcacacatgcgcgtagccaactggcagatgacagcacccatcaggggcaatcgttgcgttttctgtacgccaaatcgctgaataattacgggactaattttcaattgctgggttaccgctattccacgcgcggattttacaccctggatgatgtggcatatcgcagtatggaagggtacgactacgaatacgatagcgacggacgccgccataaagtgccggtggcgcagagctaccacaatctccgctacagcaaaaaaggccgctttcaggtcaatatttcgcaaaatctgggggattacgggtcactgtatctttccggcagtcaacaaaattactggaatacggcggataccaatacctggtatcaactgggatacgccagtggatggcaaggcataagttattcgctgtcatggtcgtggagcgagtcggtggggagctcaggcgccgaccgcattctggcattcaatatgtccgttccgtttagcgttctgaccggacggcgttatgcgcgcgacactattcttgatcgtacttatgccacgtttaacgccaaccgcaaccgcgacggcgacaatagctggcagaccggcgtgggcggcacacttctggaaggacgtaatctgagctacagcgtgacgcaagggcgtagcagtagcaatggttatagcggcagcgccagcgctagctggcaggcgacgtatggcacgctgggcgtgggatataactacgatcgcgatcagcatgactataactggcaactttccggcggcgtggtcggtcatgcggatggtattacgtttagccaaccgttgggcgataccaatgtcttgattaaagcgccgggagcgaaaggcgtgcgcatcgaaaaccagaccggcgtgaaaacggactggcggggctatgcggtaatgccctacgccacggtatatcgctataaccgcgtcgcgttagataccaacacgatggacaaccataccgatgtcgaaaataacgtcagcagcgtagtgccgacagagggcgcgctggtgcgggccgcttttgatacgcggataggcgtaagggcaatcattaccgcgaggcttggcggacgtccgttaccgtttggcgcgatagtacgagaaaccgccagcggcattaccagtatggtcggcgatgatgggcaaatttatctgagcggcttgccgctaaaaggtgaactgttcatccagtggggagaggggaaaaacgcgcgttgtatcgccccttacgccctggcggaggatagcctgaagcaggcgattacgatagccagcgcaacctgtatccgtccggcgtcataaaaggaaaaatagagatgaaaatatactcagcgctattgctggcggggaccgcgctctttttcacccatcccgcgctggcgacggtttgccgtaattcaaacgggacggcgaccgatatcttttacgacctgtcagatgttttcaccagcggcaataatcagccgggacaggtggtgacgctgccggaaaaatcaggttgggtcggcgtaaacgcgacgtgcccggcggggacaacggtgaattatacctaccgaagctatgtatcagaattaccggtacaaagtaccgaaggaaattttaaatacctcaagttgaatgactaccttctgggcgcgatgagcatcaccgatagtgtcgctggcgtattttatccgccccgtaactatattctcatgggcgtcgactataacgtgtcgcagcaaaagccgtttggcgtgcaggactcaaagctggtttttaaattaaaagtgatacggccttttattaatatggtgacgatccctcgccagacaatgtttaccgtctatgtgacgacctctaccggcgacgcgttgagcacgccggtatataccattagctacagcggcaaagtggaagtgccgcaaaactgtgaagtgaatgccggacaggtcgtggagtttgatttcggcgatatcggcgcgtcgttatttagtcaggcgggggcgggtaatcgtccgcaaggcgtcacgccgcaaacgaaaaccattgctatcaaatgtaccaacgtcgcggcgcaggcctatttatcgatgcggcttgaagccgaaaaggcctcagggcaggcgatggtgtccgataatccggatttaggctttgtggttgctaatagcaacggtacgccgcttacacccaataatttgtcgagtaaaattccgtttcatcttgatgataacgccgccgctcgcgtaggtattcgcgcctggccaatcagcgtgacggggattaaaccggcggaagggccgtttactgcgcgcggctatctacgagtcgattatgattaaggaggcataatgatccttcggcgcgttttcatcgctatcggttgtgttttgttcagcccgctgagtcaggccaactcatctctgggcgaagtgaatattgaactgcgcggtaacgtggtggattttacctgcgccgtggtggcgggcgacagtaacaagtcggttaacctcggcacctggccgacaaaacagcttcacgccgccggtgacgctacgcaaccggtagcctttagcctaaaacttgaaggttgcccgccggggtcggcgtctataacgttttccgggacgccagcgcccggcacggcattactggcgcttgctgatacggcaatggcgcaaaaactggcgattgaaattcgcgatggcgatcaacgtcgattgccacttgaacaggccagcaaggccgtcgatattgacaacaacggcaatgctaccctgaaattctatgcgaactatatcgccttagccgatggcgtgcagcccggacttgctaacgcggatgcgaccttcctgatcaattacaattagtgtccgttattgtggctcccgaacgataattcgccgggagtacatttacaataattcgtgtgatttggcgtaatcgataagctcaacgatagagtgaaggccaagtttagaaaatatattggccttatgcgcgctgatagtcttgttactcaataaaagttgctcggcaatttctttgttagacattccattggccagatagcgcagcacggtaacttcgcggttagatagtggcatatcatggtgcccgcctttgggggtacgggtattactgatgaaattaagcgtctcagatgggaaaaaagaatagccggataaaatcatttttaccgcattataaatatcattgaggtctttgcgtttacttacaaatccgtttgcgcccgctcttattgctcttccggcataaaaagcctctgatttcgacgataaaaaaagtatccgggtatgttcctggatagatttgattcgtttaagtaaggtaaagccgtcggtgcccggtaattcaatatccagaatgacaaggtcaacaggataagtgcgcagatactctatcgctgttcggctatcatccgttttcaggacaacctgaatattgctatttttaccgagtaaaacttcgatcgacattcttacaatagggtgttcgtccataatgataacagatgcaggtttcattgttgtatgcctcagactgttatgcgtccttcgttttataataagcgtcagacaccttaaagattgtgaaatagccagatctacacaccacacagtggagcaataataaagaatgagacctccctgttgactggctattttgcgtaagagtaataaatatgtggaatatccatttcgcaccaacaaaaaagaaatttctgattaagtaaaaacaatatggattatacctggtctgatttctcggaaaagtcttgcgaaatgcgaattatggatagcgggtaggatattctgtgacgttatagaaaatttgttcgtggtggagctattttctttagagttgacattgagtagtttaaactgttgtttttaagtataaaaataatatgaaagactaattgtttagtatttgttatgtaataacagaaagatgttgacgctggagacctcgaaaaacgaggaggaacaggggacgatgtaagaaaaaaatttttatcgcttaccaggacgagttgtaaatattaattttatgtgaaatatttacatttaatggaagtgaaaataagtaatttcttaaaaaatcttattcaccaaaacgttacttcgttaaaaaatgtcgtggaaagtaacgtttagctgctggatcagccgaagaaagctttgcctgtggggaaggttaaggagggtgataagttgtttaagccggtaaactacacgatgataaggtacgctttgctgacgtgctatttcttttaaagaggcgccttgcgctaaagtttcaatcatcaaccagtcagtacggctaaagctttccgataagcgaggtttggaggctgataacaaggcttcgcgtactgaggccagattttgtcgtcgcgacaggacaaaaaaacgcccagccatacggataaactgtgttatagcggaggttttatctgataccagcaggtaaatctggatatcgctttgttgccaactgagcgcgcgtagctggttaagcgcctcaatacaggagacaggtagcgcctccatatctacaatcagttgtctgagcgaccccttttcaatccacaaagaaatgtcatctaatgagcggaatgctgcggtacgttttccggaaaataagtagtgactcaatgaatagccgaggtagttgtcagttgtaattattgcctgagaaatgataccaaccggcaaggcataattgagctgttggttcagtaactcaaggcgatcaaatatctgcggcgttggagagtgataacggcaggcgcagtctttagcatttcttaaacggcggtgtctttccctgcgtggtacgctgcgcatcctgctttttccattgctctaatatatatctggtaatatggctggccataaataaccttgttccatcgttgcaccagcgtaaaaagcaatgcttcgttgctctgatgtttcaatgccttccatcagcattaactgctgaaaaaaaacttcgctatcatgttctgacggaagttgcgtcaggacctcatagccgattaattgcgcagttgagagattaacgattggctcagattttaacaattcgctgttgagatatgaatgacgtgtgggcgaagacgccaggtgtgggggatttatcctttcctttaacaaaataccctgtgccaccaaacactcctccaggcatttatgatgcagccatatattttcgacccctgaatctatcaggatattatgggcatcattgtggcagcgttaaaaaaatgcctgtaggtatcgttacttaattattggtgagatatttcgtaagccttgtaaaaagttaagtgagtttacttactgagtaagaaatgaaggttaactctaatatattttaaaaactgctgctccgttttaacatgtaattttcgcataatgctccggcggagtgactttgtctgctcttcagaaagtgaaagtaaagcggccgtttcgcttaaatgataaccgctggcgatcagttttaacaggtgacgttctgttactgaaaaatgacgagtcgtgcagtagtggcaaatgccagaagggacgctatgtcgaagcgctcgtttatgtaagatcaatatcattttccgggtaatttcttcaacatcatcttcccgataaatatgcggcagcatatacagacatggtctgaacatgagcttttctttatcgcatttattacaaataatcgcccgtagctgatgttgggtatgcataggtatctgataacagccagcgctgaaccaatcatcatccagggccaggaaagcgatatcggcattatctatctcttctggcggcagaaagtcaattttctgctgccattgattcgccagacgcgtcatgatgattttcaacccatgctcaaagtgactgttttgttccttaatagcgatacgcagcataaaaaaatatcctacacggcaggtgaatcatggtgaaatattaaagaaactgattgattttctaaatactggcggccttaattcccactttatgcgtgctgagatgtgtccaggcgatttcctggaacctggcattgcgccagaaaagacgatattcgtacacttagtcagcaaccagaacaaaagccattgactcaggagtgcctgaccgtataattctcgcgtttcgtctacacgaagtcttcacttcacaaggcgcccttagctcagttggatagagcaacggccttctaagccgtgggtcgcaggttcgaatcctgcagggcgcgccacttataaatcaacgtgttacgcttctttatttcctccttattttccatatgggacatatttgggacatcatcaccaaaaatgtcgtctattttcctcgcgtgttccgttaaatgattaggtgcaaggtgagcatatctgtgaatcaccacggataacctggacacttctgagtcgttgatgatataggttttcatattcagccggtggcatctgctcgctcgaaccatgccggcgtctactgttataaaacatttctatgtaatcaaaaatatcgcttctggcttcgtctctcgttccgtagatcttttcctttatccgttcacgcttcagtagctggaaaaagctttctgcaaccgcattgtcatgacagttgccacgacggctcattctgctctccagtccgtgcggtttcaggagcgactgccattcatagcgggtgattacgtcgccacacggccatcagaagcgcattcaggactctatcttttgtcattcatggttgcagtgaccaattgaatctattgcggcttttttttatatgtcccgctcgtcagtaacccgcttcaactctttcgggagtcggcggattccggtctgatcatctgactgctctttatttctttattggtggaggagttcgacccgtacttctttatcctggcgtaaagactgtgggtagtaatatcgagatgtgttgcggcgctggaaacagaatggccacgctcaacgacctgtcttaccgcttcaattttaaactcttcgggataacgtttaccgctcataggcacctctctttaagtcatcttaaatggctctgaggtgtctgttaaacctgtggcgattcacattgaccgcagattgtcaggttcctttacccggtagtgaaaccagtagggggcagtttatccgcactaaaagacggtgttcctgcatctgtggtggagttgaatcggatgggctttgggcacatgcgtatccttgcgtgtattggtcagttgccggagtctggattaatgcactatggctccgttgggttcttttttgggactgatggtgcattgcgacttcttgctaagaaacctgatggggcatttgtgacatacgatatgtaggaatccccgccgcccgttacccattggtggcggggaacattaattatacatgaatgttatttaattatttccgtaatattctcatttgtcctcgcccctgttctaacgtcccatgtcccagatgtaattgattctaattcatttgaatctatgccgttaatcgcccgcccggaaagccatcttccgtctatttggaatgtcttcttgtcgacatctgcatttataatttttccatcctttgttttaaagctaatgaacatcgctgtattctcatcaagagaatcagcaggatttttattaaactcaaatattacaaaggttttaatgcccatttgctgtttatatatccataatgattttatataaacgttgttacatatttttgcgttaatattaagaggcttgaaattaaaggctcgtgaatagtcgaaaaatcctggagcagttattttcaaatcaatcccgtagtatctagacattgcttcactgttaaacgtatcaagacttgggcctgcatgcagtaccggtggaaagtaataatcaggaattatcgcttgatcttgtttgttatgtttcgccctgtctattatttcttccctaatctccgtttgtttgcttattgatttaattgatgagtaatagaggatgtatgatgggatgaaatataaaaaagccattgcatatgtagtaacagataaataaatggaagccttgttaaatttcgtaaatgcagaatgagcaacaaaggaaatcgaaagaatcataaagcagagtgctccattgagagccctgctgggcattgcaggagatgcaaggaacgcaacatttgcagcaattgcacccagcatgaataaaaagcttccaaacataagtttgctgctactattccttgataacactacagagattagtagtattataaatgcaatatagacctgccaatatgcccccattgctgatggcagcctttctgaaaagtgctcaagaaccctccatgcaagtggttgattgtaccagtcttgtattgtagacgcacgggataggtttcccggagccagcaggagaacccccgcgcctattgcagatccgaatacgccaatcagtaaatatttatttctattcattataaagaaatatgctacagaaattaatacaactacaagagatgtattttcatttgagcaacctgcaaatatcgatgatatggcatatacaaagagtattaaattggattttttaccattgcttaaatatatggaaattagtatataaatggcaatgaacatgttggtccataagtaatttgctgacccaacaagccagaagttagtttgaccgagggctggatttgcaacgaagtataagaaaaataagaaaatcatcacatatggggacggtgacgactttgttaatgtagctgggatcattgtccagcacaacaccattaatgttagcgctgctgagtttattgcattgtaaatatgcggggagaaaaactttaatagagatgtgctgatcgtatctgacacaacccttccgctccatcccaaatagtgcatttttacgctagaaagcgaaagctctcttagggcataagtatagtcatcagagttcattggtgtgataaatcctattgaatacaccaacgagaaaactataaggatagcgattaccatttttaatctattgttaaccatttttcttctcattcttaattatgtacttaggccttttttttgtttctatgtaaatcctgccaatatattccccaagaatacctattcctatcaattgaacgccacccagaaaaagtacagaaacaagaagagacgggtagccaggaacattatttccaaatattaatttatcaataatcatccatgcaccgtaaaggaatgacatacctgcaataaacaatccaatgtaagtccatatgcggagcggaaatgttgagaaagaagttattccttccagcgccagattccataatttccagccattgaattttgaatcgccggcaacacgctcagcgcgggcgtattcaactacatcagtcttgccgcccacccatgacagaacgcctttcataaacagattacgttctggcatctgtttaatattttcgacaacctcacgactcattaaccgaaagtcgccaacgttctcttcaattttcggattgctgattttattatgcagcttataaaaccattcagctgtcttacgcttcatgcgcccgtcagttgagcggtctgagcgcttagccagcaccatatccgcgccagcctgccacttctcaatgagatgggggattacttctatcggatcctgtaaatcgacatcaataggaatgaccgcatccccggttgcatggtcgagacccgcgaaaagagcaggttctttaccgaagtttcgcgtaaacgaaagcggaataacgagcggatcagatgcagctattttgttaattattgattcagtcgcatctttgcttccatcgttgatgaaaacaatctcaacttcatacggttttagctcttcaaactcgcgaaccgttttatagaaaataggtatcgtggcttcttcattgaagaccggaacgactaacgagattttcatttcgcatccctaaagacaatgaactttgaataaatgaatccgcatatcaggctgatagctgaaaaggtgacaagagtaaggagtggcggcagggaacatttgtcagccatccagccaacaacggcgctcagtgttcccataaatcccacgtacatcatgtagcgaagcgtggtggtgctggcgttaaaggtgaagcgcgcattggcatagaagctgaacgatacggcgataacaaaaccggaaaagttcgccaacgcctgatgcgtatgcatcccatacacacaaaaagcaaatacgccccaatgaataagcgtgttaagaacaccgatcgatgtgtacttagcgaataacttcaacattatgaaaatcagcggattcggaaaggtctggagtgtagcactacaaattgctttgatcgatataaacgatcaataatgtggtattcaatagtttaaagttattgttatcttattaattgatcgttgttaccgatcaattggggctactgattgctaagtagtttgggacaaaaacgggacacacaaagctttgcatcggcttgcaaggctttgcatgtttttcgaagatggggcgagtgagcgccgtagtaatgggataacttgttgttagctcaggtagttccaggaacatctaagccgtgggtcgcaggttcgaatcctgcacggcgcgccatttaacctctcaaaattacgttaatccgtaagcttctgcggcggcgacgttgcgccatccgcagtacgtgacgctaatatgcaaataactaattgcgtttaatctgtttatggtgctcctcagcctggatctcgtgggagaaagaatgggcattattcatcgattaatggatgaccattgctttttcatagtcgtccatttcagaaaaggatgtcgcattttccacagtagccggggcgctgggtttctgtgtctgagccatttgctgatgcgcgaaggcgtcaccgttattcatcatctcatgtgctgtggcggataattggcgggattccattttctctgcggtgtttacgccagctgaaataaaaaaacgacagctaaaagggatgtaaacttattcatcttatttctccggtgtgggttaataagagaaataataaaacagttgttgggcctggcgcgtgacgggataatgacgattatatcagattattttgctggctagtgatagcgcctttcactatcgctacagttcaacggaggtgtttggggaatgtcaaaataaaacgagtagcgcgtgtatcggaggtgacagaaatttttccccggtgcgcagtgacgatggattttacaattgccaggcctataccgctgccttcccctttacgctggcgggagggatcaacgcgataaaaacgatcgaaaaggagcggcaaatgttccggcgcgattggcgtaccggggttttcaacaataatatgtatctggtcgtccgcttcttttatccgaagagtaatggttttacccggcggcgtatagcgcatcgtattagagagtaaattactgatcgctctgcgcagcatgatgggatcgccggtgattcagcaggcgcggccttcaaagcgcaagctcccaacaccttttcggcagaaaaactcgatgaggcgctttaccacggggcggtgctccgggtgcggccaaaagccatgacggtagcggtgattatcgccggtctgctacctgttttatgggggaccggcgcgggttctgaggtgatgagccgtattaccgcgccattgctgtcgctgttcatcattccggcagcctacaagctgatgtggctgcgcaggcatcgtcgccttgcggcataacgtgtgcaccccgcctgcggcgtcaaactgcaggcgggttcagcgtacgtttatcgtccgagcgcgctgacccgtttgcggtactcgcctggtgtacaaccgaattcacggacaaaagctttgtgaaaagaagattcgctcgcataacctaccgactcggcaatcaccatcaccggcagcacttcacgcgacagggtctgggcggcgatttgcaggcgcagcgttgttaacacggctaagggcgttgtagcggacacgtcgcgaaatagctgggcgaagctcgcccgcgacatgtgtacccgttgcgccagcgtttcgaccgtccagggatgcgccggtgtttccagcatgtgaaggatcacgcggcccagccggggatgcagtaataaattgagcacgcttttcgccgtgccagcctgcgatagccagtcgcgaacggcgagggtaaacagcgtggcgcactgctgactgtataagacatcagcgccaggtaaatggcgttctgactcctgctgtaacagcaaaatggtggcgttaatccagatactggcggggctatgcggcggcggggcaagacataacacttccggcaacgcggtaaggaaataacgtgacgtcgtgtgcagacgtagactaccgcagacgatatgtgtcggtgattcgccagactggcgcaaacggtgggcggagttttgcggcagaatcaccacctttcccggcgtaagcgtcatggcgtcgccggtaggcatttccagttgcgcttcgccctgcgtaacggtatgccagcgaatcaccgatagttcgccagcggcgtgcggcaactgccagtcgccgcctaacgggcaattcttgtcgattgagccctgaggggcgttaagcgtcaatagccgactaagcgcatccatatagactccagaacagatttattttcaaaactagagataaccatttctgtatctgttcactatatttcggactcaatgtcatttctacccttgtttttgctaaccaccaatttagacgataagacaaaaaatggcgcgttgcggataaccctgtcttttttgacgttatttatacttgtcctgacaaacagatggtgatttggcggagaaagaagatgacacagtatcaggcgctcattattggttttggcaaggcaggaaaaacgttggcggcaactctggcgaagacgggatggcgcgtggcgattatcgaacagtccgccagtatgttcggcggaacctgcatcaacattggctgtattccaacgaaaacgctggtgcatgatgcggaacgtgagggcgatttttctgtcgccatgcaacgtaaagcggcggtcgtaaattttttacgcgacaaaaattttcataatcttgccgacctggacaatgtcgatgtgattgagggaagggcggagtttattgataaccataccttacgggtatttcaggcggacggcgagcgggtgttacggggagaaaagatctttattaatactggcgcagagtcggtgatcccggctattacgggcttaacaacgacggcaggggtgttcgatagcaccgggctactcagcctgagccagcgtccggcgcggctggggattttaggcggtggttatattggccttgaatttgcctcaatgttcgccaactttggtacgaaggtcactatctttgaagcagcgccgcaattcctgcctcgtgaagatcgggatatcgcgcaggcaattacccgtattttacaggaaaagggcgtcgagctgattttaaacgccaacgtacaggccgtatcctcaaaggagggcgcggtacaagtagaaacgccggaaggcgcgcatcttgtggatgccctgctggtggcgtcggggcgaaaaccggcgacggctggcttacagttgcagaacgccggcgtggcggtgaacgaacgcggcgggattatcgtggatgattacctgcgtaccacggcggacaatatctgggcgatgggcgacgttaccggtgggttgcagtttacctatatttcactggatgattttcgtattgtacgcgacgggttattgggagatggcaaacgcagtacccgcgatcgccagaatgttccgtattccgtctttatgacgccgccgctctctcgtgtcgggctgacggaagaacaagcgcgggcaagcggcgcaacggtgcaggtggtgacattaccggtggcggcgatccctcgcgcccgtgttatgaacgatactcgtggcgtactaaaagcggtagtggacgtgaatacgcagcgtattgtaggggtgtcattgttatgcgtcgattctcatgaaatgattaatatcgttaaaaccgttatggatgcagatttaccttatacggtgttacgcgaccagatatttacccatcctacaatgagtgagtctttaaacgatctcttctctctcattaagtaaaacataaataatatagccctgttaatcagggcttttttttgcctgtcagaccataaaaatacgctaggacaaatatgctggcgtctgaaagaaaaggctttagtcaggcataacgtattataacaccattgaaataacccacgactggaaatctcgatgttaaaagttaccacacttattgcttcattattggctgcgccgctggcgttttccgcttccgcccagccgctaaccgacgttgaatatatcagcgtttctgcggtgtcagcaacgccgtcaatgcttgaagatgctattgccagactggcgcaaagtaaacaggcgtcgtcatggaaaattacgtcaatgcgtattgataatacgggttacgccactgcgatattatataaataaggagagtctgagatggataaatatcttcgtctgttaagtcagggggatcggctggggttaacattaattcgcctgagtatcgccatcgtttttatctggattggactactaaaatttgtgccctatgaggcagacagtattaccccgtttgtggcgaacagcccgtttatgtcttttttctatgaacatccggaagaatatcgtcagcatctgactcatgagggcgaactaaaaccggaggaacgcgcctggcaaaccgccaataatacgtatgcgttttcggatggtctgggcgtggtggaattgattatcgcggcgctggtactggctaaccctgtcagccgttggttagggctggcgggcggcgtgctggcattcctgacgccatttgtcacgctgtcgtttttaatcaccacgccggaggtctgggttatgccgctgggcgatgcgcattatggttttccgtatttatcgggcgccgggcggctggtattaaaagatacgttaatgctggcaggtgcggtgatgatcatggcggactccgcccgttcgttacttttacagcgacagtagcgaccctcttaccctctttatgccgcgattcgtcgggtggcgcttgcgccatccgacaatgtgttgatgaatgatggactaccctgacagaagttcctgttccacctgttgaacctgcgcctccagcgtattgcgaatttcggttagcgcccgttcctgctcggagaaataggcttccttatccgcaacggaagaggcgagccgccaggcattttccgtttccagttgcgttatctctttcaacagcgcgtcgatttgcgtgcggagctggcgtattttatggcgcagatgttccaggttattgagcctgtcgcttgccatcatcggttccagaccgctttgcaactgtgtcagtaacgcgcgaattgccgccagatcggcattctgccgcgcctgattaagctgtaccatcatctggtgcgctttttcttttaattcatcggcgaccacatccgggtgacacaggcggctggcctgacgccacaaacgttttaattcactgcgttcgtctgccgacaaacgttgatcgcgggcgtagcggaattgcgcttcctgctgctgctcccgatactggtgatagtcctgttccgcattttcctgcgcctggcggaatgcgctgtcgtcctgatgggaaaaatccgcttccagctcgcgaatttccgccagcaacgcggtgattaactccgtctgctgctggattcgctgacggatgcccaccgcttcgcgcgaggcggcattcaatcctgtccactgctgttttagcgttgccagttgatccacggcctgggaaataaattgcaggcaggattgataatccttttcccggcgttttatttcggcttcttgcttacgctgcatactcaccgcgagctgtttacgcaactccagaatacggctcatcaacggcccgagacgcagatgatagaggtcgttgaaatcgtcgaggatttgtacccgcgcatttcgtttgtcaatcagatcgcgaagttgggcttcaagcgctttcagctccagtttactggcggcaatagagggatcttgccacgtcgagagcgcccgttgagcctgtagccaggcggcgatctcttgcatggcgtcactgaatcgacgagcttcaatcgcctgggcaatcgcgctgattacggcatcctgcggctcatttttcaggtagatgagctgctgacggataatctcttcgtcctcaagttcgatggcgcttttgatgatctctaaacgtttgatgatcttattcatgacgttgatgcctggcgtggctcaaaaacggataacagataccaggtctgattcacctttttgaaaatactgaaaaaatactaaatgtattctgtagggtgtcgtacttttcgtccagagttattcacatattttatacccggcgtctgtcacccgtaacgttctatatcggcgcgcactcttttctttttactccccacgacatctttttttacacgataacgttaacgtccggagttgagccttgacaaacgattgcgccttgcggcagcgagagcgaaatgttaaaaggtgcccctcaataaaaacgatacaggggtaggacgtgaaaaacgcgtcaactgcatccggcgccagcgtgtcggatgccgcgtcgaagaatgaaccgacgcttcaacgggggttgcaaaaccgccatattcagctaatcgccctgggcggcgccattggcaccggactgtttctgggcatcggcccggcgattcaaatggcggggccggctgttttgttgggctatggcgttgccgggattatcgcttttctcattatgcgccagttgggtgaaatggtcgtggaagagccggtttccggatcgtttgcccacttcgcctggaaatattgggggccgtttgcgggctttttgtcgggctggaactattgggtcatgtttgtgctggtcgggatggcggagctgaccgcggcgggcatctatatgcagtactggctgcctgacgtaccaacatgggtatgggcggcggcgttttttattatcattaatgccgtgaatctggtgaacgttcgtctgtatggcgaaacggaattctggttcgcgctgattaaagtgctggcgattatcggcatgataggttttggtctgtggctgctgttctccggccacggcggcgaacatgccagcattgataacctctggcgttataacggtttcttcgctaccggttggcatggtttgcttctgtcgctggcggtgattatgttttcttttggcggactggagctgatcggcattactgcggcggaagcgcgcgatccacaaaaaagcattccgaaagcggtgaatcaggtggtataccgtattttgctgttctacatcggttcgctggtggtgttgctggcgctctatccgtgggtagaggtgaaatccaatagcagcccttttgtgatgatcttccataacctggacagtaatgtggtggcttcggcgctgaatttcgttattctggtcgcgtcgctttcggtgtataacagcggcgtttattcgaatagccgaatgctgttcggcctgtccgtacaaggcaatgcgccgaaatttttaacccgcgtcagccatcgcggcgtaccggtgaactcgctgatactttccggagcgattacctcgctggtggtgctgatcaactatctgttgccgcaaaaagcgtttagcctgttgatggcgctggttgtcgcgacgctattgctaaactggataatgatctgtctcgcgcatttacgttttcgcgcggcgatgcgtcgtaaagggcgcgagacgcaatttaaggcgctgttctatcccgccggaaactatttgtgcattgcgtttctggcgctgattctggtgttaatgtgtacgatggacgatatgcgattgtcggcgattttgctgccggtatggattgtattcctgtttatcgcgtttaccgttttgcgccgtaaggctcattaacttttttgcccgatcccatgttcatgcgatcgggcaatccattaatgccgcaatgtccctgacagcgcgcgaatatcgctgccggtcggcgtctgatgaatacgcaagccaaactcttccaccacggcaaaaatatggtcgaaaatatcggcctgaatgctctcatattccagccacacgacggtattggtaaaggcgtagatctctatcggcaaaccatgatcgtcaggcgccagttggcgtaccatcagcgtcatgtctttacggatgcgcggatggtggcgtaaatattcgttcagataggcgcgaaatgtcccgatattggtcatgcggcggtgatttaaggctgattccggcgcatccagttgtttattccattcatcgatttcctgatgacggctggtaaggtacggctttaacagttgcgcggttaacagccgctgtttttcatcatcatccagaaaatggatactggtcgcgtcaatattaatgctgcgtttaatccggcgtccgccggacgcagacatgccgctccagtttttgaatgagtcggaaaccagcgaccaggtgggaatggtggtgatggtattatcccagttgcgtacttttaccgtggttaagccaatatcaatgaccgcgccatctgcgccatatttcggcatttccagccagtcgcccagtttgagcatatcgttggcggaaagctggataccggcaaccaggccaagaatcgggtctttaaagaccagcattaataccgcggccatcgcgcccagcccgctgattaaaattgctggtgactggccaatcagcagtgagatcatcagaatgccgacgataattgcgccgatgagcttaataccctgaaatattccttttagcggtaactgagaggcggcgggccatttttgcgatagattgaaaatcacgtccagcaaggaaaataacgacagcagggcgtaggtcataatccataactgcgcgcaggtcgtcaggatatccgcagcctcactgcctttttgtagccagagcgcggcctgaatattgacaatgatgccttgcagcgtaaaagccagacgatggaataatttattctgggtaataatttgcagccacaggcgggaactggcgctggcacgtttttcgaaagcgcgcagtactatccagtgcaaaataatatgcacgacaactgctgtcagaaaaataataccaaatatcaccaccagcgacgtggtgtgattcatttcaattcccgctaaatcttctacccgggatatcaattcctgcataatctctcctttataaacagcagcctatgatgactgctgaatggcatttatgcaaatcaggacgcctgcgcttcaggcataatcagcaacagacgggtaaaagcgcctctggggttatccatacgctatattttatcctgcgccctgtaaacgtcgttattttacgcggttccctctttttgaacaggcgccagtccgtcaacaatgaatgaaaactttttaaccagaatgtttaaaacgattgcaatatctctgtcggataatgattagcaccgtcgtacctatcaacaataacattaaggaacatcggatgacccaaaagcgtaccctgctaaaatacggcatactctcgctggcgctggccgcgccattatctgcctgtgcgtttgactctcttacggtgattggcgatagccttagcgataccggtaataacggtcgctggacctgggatagtggtcaaaataagctctacgacgaacagttggccgaacgatatgggctggaattaagcccttccagcaatggcggctctaattatgccgccggcggcgcgacggcgaccccggaattaaacccgcaggataataccgcggatcaggtacggcagtggcttgccaaaacggggggaaaagccgaccacaacggtttgtatattcactgggtcggcggaaacgatctggcggcggccatcgcgcaaccaaccatggcacagcaaatagccggtaatagcgccactagcgcggcggcgcaggtagggctgttactggatgccggcgccgggctggtcgtggtgccaaacgtaccggatattagtgcgacgccaatgcttctggaggcggtaatcaccgctgggctgggcgcagcggcgcccccggcgctaaaagcggcgttagatgcgctggcggagggcgctacgcccgatttcgccagtcggcaacaggcgatccgcaaggcgctgctggcggcggctgcaacggtaagcagcaatccatttattcagcaactgctcgttgaacaactgctggcgggctatgaagcggcggcagggcaggcgtcagctctgaccgattattataatcagatggaagagaaggggctggagcaacacggcggcaatatagcccgtgccgatatcaacggcctctttaaggaaattcttgccaacccgcaggcgtttggtctgacaaataccgtaggtatggcctgcccgcctggcgtatccgcttcggcgtgctcctcggcaatgcctggatttaatgcgtcgcaggactatctgtttgccgatcatttacatcccggtccgcaggtccataccattattgcgcaatatattcagtcgatcattgccgcgccggtacaggcgacatacctgaaccaaagcgttcagtcgatggcgcaaggcagtcgtaccacgcttgacagccgttatcagcagcttcgccagggggaaaatcctgttggttcgctgggcatgttcggcggatacagcgggggatatcaacgttatgataataatgaggccgacgggaacggtaatcataataatctgacggttggcgtcgattatcagcttaacgagcaggttctgctgggagggctgatagccggttctctggataagcaacatcctgacgataattatcgttatgatgcccgcggttttcaggccgccgtattcagccatttacgcgccggtcaggcgtggctggatagcgatttacactttctgtccgctaaattcagtaacattcagcgcagtataacgctcggtgcgctaagacgggtggaagagggcgaaaccaacggtcggctgtggggcgcgaggttaaccagcggttatgattttgtcatggtgccgtggttaacgaccggaccgatgctgcaatatgcatgggattacagccacgttaatggttatagcgagaagctcaataccagtacatcaatgcgttttggtgaccaaaacgcccattcgcaggtgggtagcgcgggttggcgtctggatcttcgccacagcatcattcactcctgggcgcagattaattatcgccgtcagtttggcgatgatacgtatgtggcgaacggcggccttaaatcgaccgcgctgacgtttagccgcgacggaaaaacgcaggataaaaactgggttgatatcgcgattggcgcagattttccgctgtcggcaacggtgtccgctttcgccgggctgtcgcaaacggcagggttaagcgatggcaatcaaacccgttataacgttgggtttagcgcccgattttgatgacacgccagggagggccaaccccgttcgttcgtgacacgatgagccgaaagcgcaacggtaagttttataaaaagtaagtattttcaaaaatgtgggtgaagcctgtgacgtcgtttgtaaattatcgtataagcggagtttacgtttttggcggggcgcaggtatgaataaagagtccatatttcgtcagttggagctacggctagccggatgttcactaacagctgacgcgttaggcgcgtttagcgcaatggcgattgccgacagtctcaggcaaaaacgcagcattattagtcaccatcttaataacttgcatcgtgagcagcgggtggtcaaagtgaatagccgcccggtgctgttcctgcccgtcgaggcgctacgtcgtcaccaccggctggcggttcggcagggggattacgcgtccattcaggcgctgtgcgcggagcggcaggacagtctggagctgctcattggcgcacagggcagcttgcaggagtccctgcgtcagtgtaaggcggcgatcagttatcccggcgcgggcttgcctttgctgctgcgcggcccgacggggacaggaaaaagttttttggcgcgtcagctttggcagtacgccatcgagcagggcattttgcccccggaggcgccctttaccgtgtttaactgcgccgaatacgctaataacccggaattgctgacgtcaaaattatttggtcatgccaaaggtgcgtttaccggcgcagacagagcggtatccgggttaattgagaccagtaatggcggcgtattgtttatcgatgaagtgcaccgtcttccgccggaagggcaggaaaaactgttccattttatggataacggcacctggcgtcgcttaggcgaaagcagcgatgaacgcagcgccacggtacgtctgatattcgcctctaccgaagatctggaaaagcactttctggcgacatttattcgccggataccggtcattgtcaaaattctgcctatcgccgaacgcggacagtatgagcggctggcgtttattcaccatttttttcgtcgcgaggcgcagcgtcttcatcacgatttgtcgctggatagtgaaattatcagccaactgatgcaggagaccctggaagggaatgtcggcggcctggaaaatctcattcgtaatatttgcgccagcgcctggactttcggccagcgtgacgatggggtactggaagtaaaagccgggcaactgccggatcgtctgctgatggaggtgccctttaccgttccgcagacggcggaacgcatcatgatttatcgcgaaggtggcgtttttccgcgagtttccggtcagcatcaggaatatttacggttgacggaaaacatttgcggcctgtgcgaagagctggcgcaggagaatatttccgcacggacgtttgacaagctggtctatcaaaaccttacgttatatctcgatgccttaatgaataaagagagccctcgcgctcgtcaggacaagcggctgcgttttatcgaagatgtcgggaaagcgatcgctacacattacgatctcgaactgaatgcggaattcgcttatctcactggacgttaccttaccagcctgccgttaacgccggtggaggcgtcgccatcggttcgtcatgtgatgctgcgctggctggaggaggcgccggggctggcgcagcgtgtggcgcaaaaactgctggacgtggtaaataataaatatgatttgttaatcgacacgctcgacagactggtcgtggcggccatcgtcagtaatgccattgacgccaccagcggcggtaaggtaaaagcgctgatcatcgcgcatggttattcgaccgccagcagcattgcaggcgtggcgaaccgtctgattggcgaaaagatttatcatgcgatggatatgccgatggaggtcgcgtttagcgatgtcagccgggccattgtcgattatctccagcatacggatacccgcgcaggcgtcatggtgctgatcgatatgggatacaccaaagagatcgccgatgcgcttttgagcgtaattcatggcccgctggtggtggtcgataacgttacgacgcgtctggcgctgaacgtggccagcgagatcgcgctgcaaaaaaacatcgaacagatcgccgaagagatcgtcccgttaaatcagtcgcgctgggatgtcttctggcccgcgcagaaaaaagcgcgcgcgctgctggtgacctgtattaccggcatcgggacggcgtttaaatttaaaaatttgatggaaaaaagtcagttgaccgactttgatattaatattatcgcctgtgaatatactcgcctgaaaaacagccggatggcggcctcgttgctgaatcagtatgaagtgattgcggttgtcggcaccattgacccgcagctggcgggcgttccctgggtggggattgaagagctgcttggcgagcaggggtatgcgcatttaagtcagttattaagcggttatcttaacgataaacaaattgcgttaattaataaaaatatggttcgcgaattttcgttgcataatgtggttaattcgctgaccattctcaatgccaataagacgatagggcatatcgaaacgattattgccgaatggcaaagtacgctgggcttcagctttaataataatttgattattagtttatatgttcatttgagctgtatgattgagcgactggtcatgcgcaatgaaattacccactataaaaacatgacggaatttaacgagcggcatggtgaatttatcgcgatggtaaatcattcatttcagcggttgaaaattctttataacgtggcgctgccggtagcggaaattggctatatccacgatattttcgaattacggatagaggattttcactggtagctgcggtagttcagggaaaaaggggcgctagcgccccgcagaagaaagacctgatggcgctacgcttatcaggcctacagatcgctttgtaggctggataaagcgaagccgctatccggcataactattaatattcaactttccacatataccggcgggtggtcagtgggtgattacgggctgtcgccagagcgaggttataaacgtccagcacacagttgtgcaacagaccgcagaagtattcgccaacgtcggtggacagatcctgaatgccgagtttatccgcatcgatcaactgcagttttccctgatagcgttcaataaagcgaatcgcacgatcgtccagcggacgagtgcgaccactgctttgcagcaatataaacggcgtgcccggctcggtgatttcgaacggtccgtggaaatactctccgctatgtatgctggcggagttgatccactgcatttccagcagaatacagatagactcctgatgcgcggcgccgaaagaggggccgctgcccatcatatagaccaccttctcatccttccattcggcggcgaaacgctgagcatcttcttgtacctgccgttgggcgccgtgaacaacgtcgctaaagcgcccaaatgcgctgactaactcatcgtattgcgcatagccctctgtttgggcgagaatttccagcgccagccacaggctgtatgcggctttttgttgtgcagggtcgaccgtttccggataacgcgcccactgatattcaatgatgtagtcgctgtattcgcacaacggcgtgtcaggttggtaaaccagaccgatggtcgccgctcctttttcacgcgccacgcgggcggctgcgacggtttccgccgtattgccctgctgcgaggcgagaataacgacgctattttttcctaatgcttttggtgtggcgtggacaaattcattactggtgatataaccgacagccagttttgacgcttcacagtccagaaagtattttcctggccagaagccggttaatgaaccgccgcagccgacaaaccagacgcgttcaatgttttgtttacctaaaatatcgctaataatacggcgggcattttcatgagcaacagacatatttatctccttagcgtgtagcgcgtcctccgcaacagcgcggataataacgagcattaataaaaattaaatttcttgcttacttttcattttttgatggaattgcggatctttgggtatcgccggattaatgcctttttgcgggggtaatatcgcacatagcatttgtagcggaatgatatattcaaagacggcaaagtcctcatcattgacaaacgggaaattcagattcagaccattattttctacctgcgggccgatgcggtaaatagacggcgtccactcaccgagtatttgcgccagccgatcctgacgcgcgtcaggctgcgggtcgagcataatgagtgcggattgcgcattaaaggcattgtaaataccgtgaataaactcctcgaattcgtagcccgacaccggacagcgcaacgtctccagcatcttgagcgcaccctcctgcaccgtaccgaacagcgttgccgggccggtcagacgaatatctgcgctatcgcgcagcgccagcgcattggtttgcgcccacgcctgcgaggcggtaaccagcgcgggcaggtggttaaaggtcttttccatccgcagcagcagtgaccggcgctgttcgccgtccagccgctgttgctgcccggcgacggcgagcgccagcagcatcaaattgagaaccgtgcagtgatagccttttgttttcgcgccagcggtttcttcgccgcagggaacggtaaggatataatccgccgcccggtcgatagtcgcaggcgccacgccagccattgaggcggtgatatgaccaacattgcgggcgcgctccatcgccgccagcgttgagaggctgccgccgccctgggagatgccgacaaccagcgccttgccgctgcgggcaagcgtctcgtcgtcaagcataaacggccagcagacatccactggtaatgcgcaccagcgctgcataaacgtgcgagcggtcagcgcgccgtggtatgacgtgccggagcctgtcagaataatgcgggtgacgccgcgttccgttagcgcctgcgccgcgcgccagagatcttcccgcgtctgcgtcagcatctccagcaggcgaaggggcgtctcgttcatatagtcttctacttgcatagtgttacctctcgtcaaagcaggcccagcgcgctggcaagaagcccaaacacgacggtgcctaacaggatccagttaatgttcacgcccttacggataagtttgtacatgccgagcgtgaagagcagcggcagcagggaagggaggattttgtcaataaaatcctgcactttcatggtagtctgcccggcggtaaagctcagcggggttgtaatgtcgatcatgctggcggtcatggcgccgacgaccatcaacccgacgattgacgcgatataagtcaccctgtccatcagcccgctttgccagaggcgcatcagccaggtggtccccgcccggtagcccagtttgagggcgtaccagcggcagaggatgtgcggaatgttatagaccagtagggcgagaatcggccccagaatgctgccctgctgggcaaagtagatccccatcccggcggcgataactttcagcgatccccagaagatggaatcgccgatcccggccagcggccccatcaggctggttttaacggcattgatcgactcttcgttaaagtccgggttgcgttgattttcctcctccatcgcaatcgacaggccaaagacaaacgttgacagatgcggcgtggtattgaacagcaccagatgacgctgtaaggcgcgccccagttcggcggggtcctggtagatacgctttagcgctggcgacatagcgaaggcatagcccatatgctgctggcgttcatagttccacgatccttgcaacgtaaaggagcgccagaaaacgctgcgtaaatcgcgggcggtgatgcggctttcgctttgcgagtgagcctgtgcgtcgtcgatcagggtctgcgtcacttcactcatgattagccctcctgttgggatgtgttaagaaactggctgataatgaaagccagcaccacggcaaacagcgcgatggcgatgatgtccagtttggtatatgcggcgatcagaaagcccagcccaaggtaaggcattaatttgctgctaagcatcatgctgatcagcaacgcgaaacccagcgccggcaaaatcttactggcgacaaccaggccattggtaataaaggcgggaatggcgtcgaggaaccaggtgacggcggcagaaccgagcaaaatggcgaaaaagaccggcagaaaaccgcttagaaaatagagcagcgttgggcctcccaggtgcataacggcaaccatccgggtattaccctgcgccgcataacgatcggccatgtggccaaagcgggcgttaaccacgcgcaccaggacgccgagggtctgcgccagcatagagataggaatcgcgatggtcagcgccgcttcgggcccgcgcccggacataatagaaaacgcggtcgccagcaccgaaccggtgacgacatcaggcggtaccgcggcgccgatagcgacattacctaaaaagatcagttccagcgtcgcgccgatcagaatgccttcgtgtaaattgccgcagaccagaccggtgagggcgcacatcaccagcggacggtcaatcatcgacacgccgagtaaacgcccgtcaagaatgcccagtgcggcaatcaggccgagcagcgttgcggtgagcaacatagtgacctccgggttcagagtttatcgttaagcaattcggcggaatgagccggaacctggcgcatttccagacggatgcctttggcttttagcgcctggctatcggcaatctcctgctcggtcaggtatatggctttgccgaactgctgcgcgccctctttttgcgcgataccgccgtagttgataacgctaatccctggcactttctcgacgaaggcgagggtttcggcggtatttcccagcaccaccatcacttttttgtgatccagcttgccgctggcgagtttttccgccgcctgttccaccgtgataatgtccagcgacacgccagcgggttttgccagacttaatgacatagagacaaacgcgtcgccggcggcgttggcgttagcgacgatgatatggtcgatatccagcgcccgggtccaggcgaagaccacctggccgtgcagcaggcggtaatcaatgcgcactaatttgatcatgggattctccctgtaggtcagcggatggttgtgttattagcgtgttgataaagacaatggattcacgcgccgcattggtggcgtaggtaatggccgcgtctgtgctttcttcttcacagagtaaaaactccagcaacagggtcatgttgacgccagccaccacaaaaacgtgacggtgacgcatcagcactttcgcggcgctattgttgatgctgccgccgagcagatcggtaaacaccaccacttcttcgccgttggcttgcgcgatcagattttcgagggtttgttcaagctgctccgtggtgacaatatcgccatcgtaggcgcaaaccggtgtcacgccgtgttcgtcgccaatcagcagcgatagactgttaataagtccgcgggcaaaagggccatggctggctacataaacatgtctcacccgttttctccttcatccagatagggggtatccagatatggcaaacggcgtgccagttttaaatgttatttattttcaataaattgaaagaggaagttaacactagcgatgtaaaacctggcacttcgcgccattgatcattgaggaacctggcagaaaggtgaaaaaagccggacgggcgtccggcttaggcaggggattaaacttccgtcagtgtggtttcaagcggcagacgtgatttcggcagcccggcgttgaaatcctcgacgctatgatggccgaccggcaccacgaccagactggtatagcctttttctttcagaccaaattcagcgtcgagcacctcggcgtcgaaaccttcaatggggacggcgtcgagacccatcgcggcgacgcccagcagaaagttgccgacgttcagataaacctgcttcgccatccactggtggtcatctttcagcgagacgcggtgcatatcggcgaaaaagcggcgacctttatcatttgccgctttagcttccggcgtagcgaaacggccatcagcatcttcctgatcgacgacgcgttcaagccatgcgtcatccattgcggttttggcgcagaagaccaccacatgggaggcgtccagcattttgcgttcgttgaacgtgtagtttccggcagcggattttgctacgcgcgctttgccttcttccgtactggcgacaataaagtgccacggctgggaattggtgctggaggggctgtactgtagtagtgtttttattttatccgcttcttcggcggtcagttttttgctgggatcgaacgccttagtggagtagcgctgtaaggcgacagaaacgatatccataaatgctcctggttggtttagtacccttttgtatcagcagggtaccgggttatcggtaaaaagataagggaggaaaatgcggaaacggttattgcatcagcgcggccgcaggcgcagttgctctcttttaggcagcccgtctacgaccagattccatgagtcatttatcaaatcgttgagtagcgagacggtgatatcctcgcccgcatagactgaaatccagtgtttcttattcatgtgatagccaggcgcaatgctggggtaaatttgttgatttaccagggacttttggggatccgacttcaggttcaccactgggcgacagtgatgttcagtgaacagcatgaatattttgccgccgactttaaacacatcgtactgtgggccgaaaggccagcagtgttcggtaaaaggcagttccagcgcaaagcgttttgcccaggcgtgcagtgtttgaccgtccattattgctcctcgcgagtcagcgcgcgccacatggcttcgaatcccagcgcaatatattcgccagcgcgagcgggatcgcgcgcggcgaaatccattgttgtttcagccagcgccagaaaaaggccgtcgccgaaggcgcggtattcatccgacataaacaccatcaaaacggaacgatgacataaatcgcgcaattcggggaacatatcgtcggcccgttgttccgtctctttggtgagcttttcgctgacggccagttgacggatcgcccgatggcgcgcgggatggttcagaccccaactgatgtaactgttccagataaaacgagtcatcattttggcatcggtaatggatcgatccagctccattatcattgactggcagagatcctgctttaaatgcaaatacaacgtgttaatcagctcatctttggtcgcgaaatagcgaaacaatgttccttctgcaacacctgcgttacgcgcaatcaccgccgttgaggcggcgataccggattgcgctatcgcctgggttgccgcttccagtaatgcttgttttttgtcttcactcttcggacgagccactacacgttacccttatgtctggaaaaacatgattgaatcatgcccgttgtcgcgtcgcaacggtgaatgtcaacctttgaaaagtaccttgacggcgtatctttgctttctataatgagtgcttactcactcataatcaagggctgccgcatgaagtggtagaaaagcatattgcaggccatgcgataagctgtctcacaatttgtgtggttattactatgcttattgctgttgccgtaaatgtgcggtgcgggagccgctgacgagtttgatagaggggagagcacgatgaccatttccgctcaggttatcgacacgattgtcgagtggattgatgataatttgaatcagccgttacgtattgatgatattgcccgtcatgcggggtattccaagtggcacctgcagcgcctttttatgcagtacaaaggggagagtctgggacgctacgtgcgtgaacggaagctaaaactggcggcgcgcgacctgctcgacaccgaccagaaggtgtatgatatttgtctcaagtatggttttgattcgcagcaaacctttacgcgcatttttacccgcacgttcaacctgccgccaggcgcttatcgtaaagaaaagcatggccgtacgcattgaaatgtttaatcggccagcgaaaaccagcgccgccagataaagcgaatgacataatattccagcgcgccgagcaacagaaaccataaacaaaacaacaaagtataaagctggttgagatccataagatgaaagatcccgaccagtttttgcgccagcgcaaggccgagcgaaggggcgggcagcagcaggctggagagcaacgccatcagcaaaataccggcagcggtcatcaatgattcaagcgggtgtttcatggctttgttaaacgtaagttaaaacgccattgtccgggatatcgcctggtaaggcaaatatgctgtctattgtcccgcccagatttcacaatgtttttgtaccagacctatcagcgatccgccgtcggcaataaactcccgcatatattgcgcttcgttaccgccttttttcacctgcagacgtagcgcgtcaatggcgctgtcggcgcccagcttgcgcgcagagggggtaacgttgtccagcagacgcagcgtatcatctgccaggcgacggcggtcgccggtataggcatcggttagcacgccctccagaccatagcggcaagcctgaaaacggttgaatttatataacagatagtcttgttcctgcggtttaaagggacgctcggtcagcagccagtgcgcggtcgcctgaatcaaccctgccatattgatggcatgatcaagagtgagcggcgtatccatcacccgaacttctaccgtgccaaaggccgggctggggcggatatcccagtgcaaatctttgatgctgtcgatcatcgtggtgtaagacagacgacgaaatagtccggcaaactcttgccagttactgacccacggcatgggcccgttatcgggaaaagcggaaaaaatattcaggcgcgcgcaggcaaaacgggtgtcagctccttgcatatagggggacgcggcggagagcgcaataaagtgcggcacaaaatgcgacagcccgtgtaaaagataaatcgcatcgtcgccgttcgcgcagccgacgtggacatgctggccgaaaaccgtcgcctgttgaattaagtagccgaaattttccagcgtgcgttgatagcgctcattatcacagacctcctgacgctgccatttttgaaaagggtgcgtaccgccgccgcaaatgccgagatggtgttccgacgccgcctgtaaaataacgtgctgcatagcagaaagttgggccgccgcctggtcaatatcgcggcagacgcccgtggccatctccagcatactttcggtgatatcgtgcttaatttctcccgcagtaagttggggcttaacggcgtcgatcagcgtagaagagtcctgacttaaatcgtagccaggtggattgatcacctgcatctccagctcaataccaagcgtataaggttcagaaacgtgaaaatcattcagcgccatagggatctcatttatcggggtattgcgctaagtatagaagcgggagcgctcctgtcgtggggaacgcgcgttattgcagaaacaagagtaataacgctattgtcacgttgaaaccattctgtacggacggtacgttcagccatcgtggcggcaaaggctggcagcagatgtaacgagatgtgcgtggcggtaagcgaggtaacttttgcgctattgaatcccgggagcgtgacgcggtctgaaaaggctttataaacgctctctttggcggagaaagccagcgtcagggcaagcggaaaagggagcaagctcgcctggagaatttggcgctcatcgctatcaataatggacggcgccagctctgtcgccgtgtgctgactcatgattttttctatatcaatgccgatacgctgtcgggatatgacggccagcgccgttgtcgcacagtggctgatgctgccaaataggccgtccggccatagcggctgtcgcttgtcgcccataccgggcactgtcctgacgcccacctcgcgtagcgcatgaacggcggcaatgcggcctgccagatgttcagctttacgcttgcgtccggcagaccggagccgatcgtgatgaggtagccatagcaggtcgtgttcgcgaaagctgctcgcatcaaagtcgacgatatgcagcctgtgtccggcaaagggaaggggaaaatgagatgtcagcatcgtttttgccaattccctccccgaatgagggagggaaggttgccatcagaaatgggtattaatgctcatataccacgtacgtcctggttcgttataggtgtacgcgccagcgcccgccatataagcgccagtttgcgtatccctgacggtttgcgcgttaccttcacgccacagacgtttgtcaaagaggttatccacgccaccggtcaggctgacatttttggtcacgtcccaggtcgcgctcaggccaacaatactgtatgggctgaccgcttgcttatctgttccggtaacggggttaccctgataatcatatttcttcggctcttgtttgccgtaccaggtgaaggtcgattgcagagaaacgtcctgacgtacctgccagctcagggttgagttaagcgtgtactgtggaataatcgacaggcgttcgccggtctctttgtttttactctgcagcatatacgtaacgttattcgtccagttgacggtgtcgctaaccggtacgtttaacgtgccttccagaccttcaacgaccgctttcggcacgttctcccactgataaacatccgttttgccgttgttgatacgctgcaacggcactgtacccgcttcaatcttattgcggtaatcattgcggaaccaggtgacgccggccagccagccatcgcgtttaaattccagaccgatctctttattgatgctagtttcggctttcagatcatcgttacccatcatatagcagccgatgccggtacccgcgccagtcgcgtagcaaccctgacctttactgtacaaaatatagtttgggttagtctggtacagactcggggctttataagcgcgggcgattcccattttcagggtaaagtcatcccccagaccttgcgacaggttgagggacgggctccagttatcccccacaatactgtgatgatcgaaacgtagccccggcgtcagcatggtgctgtcggtcagttccatgttgttttcagcaaacagagagaaaatttccgcttttgaataggggctacgattggtactgctgtaacccgggatatttccccccataaaggtttgcgagttggagagctggtctttcatacgctgttgggcccattcagtacccagcgtcaggttttgattgaccagcagatcgaaaggaaggctcacttcgctgtgtagggtgacgtcattcaaatcggcatcggcatatttttgcgatgctttgggatcgaaaattccttcggtgccgcctgccaggccttccggcatccgggagttacgggtatgttcgtattgcacccagttactggtggttacgccattattccagccgccgttccaggtcagagagtagttctgccgatagaggcggttcgtctcttttccgtaattatctttcaccagttggttcgtattggtgttctgagtatcgccggcatagagattgccctggcgactgtatccggcctccagctccagagactgaagcggagcaaaatcccaacgaaccacgccgttgatatctttgttaatgaccccctcgcgtcctgctggtagcgtgtcggcgtaactcccggtacgttcagactgatgcccctggttaatattacgcgcatccgcctgcgttttgtcgaggttgccatacaggcggaagctgaaatccccgcccagcgggccgttcaggctaaagttagtgcgtttggtcgcgccttcgtctttatgttccggcgcgttgaaataggtattccaggaaccgtgccactcgctaccgccttttttggtaatgatattgactacgccacccgccgcgccgttaccgtagcgtgcggcggcagggccacgcagcacttcaatgcgttcgatcatctccggcggcacccacgcggtatcgccgcgggtatcgcgttcgccgcgccagcccaggcgcaccgagttacggctggtgacgggtttaccgtctatcaggatgagggtgttttccggccccatgccgcgaatatcgatttggcggttattcccgcgctgaccgctggtggagttgccggtcaggtttacgcccggcatggtgcggatgatttctgacacgtcgcgcgcgggcggatttttgcggatctcatcggcggtgatggtggatacgcctggcgcctgtaggttttgctgggcagcggtcaccacgatggtgtcttcattggtgagcgcagcgctatcggttttgtcttccgccatcacgggcagagcggccccgtaaatccctaaattgaccagtaaggtcagggaatgaatcttcttgttcattgtatatcctgcttttctttagccacataagccaaagcgcccgtcaaaggcattggccgggtggtgaaattgtgttcgcgcgtcccatagcgcgacaatacgctattgcaaatgcaaatagttatcaataatattatcaatatatttcaccttttatatacaaaattcataataaacacagggttataatgaaagaggcgctggcaacgggaagtgaggcctggtggaggacgaaaaccgggccggaatggatacgggaaaaagacggaaattatcgggtcactttttggtggcgcgacccgcagggaaacgaaacacactccccgatacggcgtgtctgggtctacatcactggcgtaaccgatcatcatcaaaacgcgcagcctcagacgatggcgcgtattgccggaacggatgtctggcgctggagcacggcgcttagcgctaactggcgcggcagctactgttttattcctaccgagcgcgatgacgtttttgccgcttttgcgccgggcgaaacgcccgatcggaacgtgctgcgtgaaggctggcgacagctattaccgcaggcgattgccgacccgcttaattcgcaaagctggcggggaggacgtggtcatgcggtttcagcgctggaaatgccggatgcgccccttcagccgggatgggatcgtcctgaaacgccgtactcgccgcctttgatgatgcagtggcatagcgaacgtctgggtaactcccgccgcgtatggatattgacgaccggagacgaggcgccggaggaaagaccgttggctattctgctggacggtcaattctgggcggaaaatatgcccgtctggcccgcgctcgcctcgctgactcatcaacgcctgcttcccggtgccgtctatctgctgattgacgcgattgatactcaacaccgcagccaggagttgccctgcaatgccgacttctggctggcggtgcagcaggaactgttgccgcaagtcagagccgtgacgccttttagcgatgatgccggacgaacggtggtcgccggacagagctttggcggcctgtcggcgctgtatgccggcctgaactggccgacgcgttttggctgtgtactgagccagtcaggatcgttctggtggccccatcgcatcaccccgccggagggggaagtcattacccggctgaaaaccggcgcattatgcgcgcgcggactgcgtatcgtactggaagccggcgtgcgtgagccgatcgtgtttcaggcgaatcaggcgctttatgcccaactgaatacttcgcagcagtccattttctggcgtcaggttgacggcggacacgatgcgctttgctggcgcggcgggctaacgcaagggctgatgctgctttggcagccgcttatcgacacgctttaaccgggcacatgtccatgacaggagttgagtatggaattcagtaatcccttcgataatccgcagggacagttttacatcctgcaaaatgcgcagcgtcaattcagcctttggccagcggcatgtgcgcttcccgcaggctgggacgtggtatgcgaaccgcaatcgcaggacgcgtgccagcagtggcttaatacgcgctggacaacactgaatccggcgcattatgccgataagcaggaggcgaaatgacgcagcgtttaccgttagtcgccgcccagccggggatctggatggcggaaaaactctctgatttaccctccgcctggagcgtggcgcactatgtggaactgaacggcgagctggatgccgccttgctggcaaaagcggtagcggtagggatgcaacaggcggatacgctacggatgcgttttaccgaagagaacggcgaggtctggcaatggatagatcctgagcacaccttcggcgagcccccgattgccgatttacgcgaccagcccgatccgcatcacgcggcgctggcgttaatgcaggcggatttacggcaaaacctgcgcgcagatagcggtaagccgctggcgtttcaccagttaatccgcattgatgatacccgctggtattggtatcagcgctatcaccatttgctggtggatggctttagcttcccggcgataactcgccagattgcggcgatttatcgcgcctggcagagcgacgctcctacgccggagtcgccttttaccccctttgcggatgtggtcgaggaatatcagcgctatcgccagagcgaggcctggcagcgtgacggcgccttctgggcgcagcagcgccgcgagctgccgccgccggcgtcaatgtctgccgcgccgttgccggggcggtcggcgagcgcggatattctgcgtatgaaattgagcgcgccggcgggggcgtttcgccaactggcggcgcacatgcctgagataccgcgagcggatcttgccctggcgctggtgacgttgtggctggggcgattatgcgggcgaatggattatgccgccggatttatctttatgcggcggatgggctcggcggcgttaacggcgaccgggcctgtccttaacgtgttgccgctggcggttaaccttcatgcaacggaagatctgccaacgctggcgaagcgtcttgcggcgcagttaaagaagatgcgccgccaccagcgttacgacgccgaacagattgtacgcgatagcgggcgagccgcaggggagacgccgctatttggcccggtgctcaacataaaagtgtttgattatcatctggatcttcctggcatacaggcgcaaacccataccctggcgacggggccggttaacgatcttgaactggcgctttttccggatgaaaacggcggtctggatattgaattgctggcgaatgcacagcgttacgatgatgccacgctctcccgccatgccttacgattgatggcgcttatcacgcagtttgcggataacccggcgctgcgctgcggcgatgcgcaaatgctgctggcggaagaacaaacgcaattagcacaccttaataatacggcggtaacgattcccgccgccacgcttagcgatttggtggcgcagcaggcgcaaaaaacgccagaggcttccgcgttggcagatgcgcattatcactttacctaccgtgaaatgcgcgaacaggttgtggcgctggcgtacgcgctgcgggaacgcggcgttcagcctggcgatagcgtggcggtggcgttgccgcggtcggttttcctgaccttagcgctgcatggcattgtcgaggcgggcgccgcctggctgccgctggataccggttatcctgacgatcggctgcgaatgatgctggaagatgcgcagccgaaactgttaattacgactcaggcgcagctggcgcgctttcacgatattccggggatggaatatttgtgttatagccaaccgctaccggtcagtgacgccactccgctgaggctgtcgttaccgcatcataccgcttacatcattttcacctctggctcgacgggcaggccgaaaggggtgatggtgggacaaacggcgatagtcaaccggctgctgtggatgcaggatcactatccgttgacggcggatgatgtagtagcgcaaaaaacgccgtgcagttttgacgtctcagtatgggagtttttctggccgtttatcgccggggcgaaactggtgatggctgaaccggaagcgcaccgcgacccgctcgcgatgcagcggttctttgcgcaatacggcgtcacgaccactcattttgtgccgtcgatgctggcggcctttattgcctcgctcacgccagcgtcggctgggaaaagctgcgcttccttaaagcgcgttttctgtagcggcgaggccctgccgacggcgctgtgccgcgaatgggagacgttaaccaacgcgccgctacacaatctgtacgggccaacggaggccgcggtggatgtgagctggtatccggcctgtggcgatgagctggcggctgttgacggcaacagcatcccgattggttattccgtctggaataccggtttacgtattctcgatgcgcatatgcagccggtgccgccgggcgtggctggcgatctctatcttaccggtatccaactggcgcagggctatctggggcgtccggatcttaccgccagccgttttatcgccgatccttttgcgccaggcgaacggatgtaccgtaccggagatgtggcgcgctggctggattccggcgcggtggaatacctggggcgcagcgacgatcagctcaaaattcggggtcaacgtattgaactgggcgagattgaccgcgtcatgcaaacgctgccggatgttgaacaggcggtagcacatgcctgcgtctttaatcaggcggcggcgacgggtggggatgcccggcaactggtcggctatctggtgtcgcactccggtttgccgctggatttaccggcgctgcaggaaaaattacgccaaaaacttcccgcgcatatggtgccggttgtgctgttgcaacttgccagcttgccgcttagcgctaatggcaagctggatcgcaaagccctgccgctgccggacctggcgccgcgcgtgaaagggcgcgcgccgcagtccgcaacggagattgctgtcgccgcggcgttttcccgcctgctgggctgtgagattaacgacgttgaaagtgatttctttgcgctgggcggacactcgctgctggcgatgaaactggccgcgcagctaagccagacgtttaaccgccaggtgacgccggggcaggtgatggtggcgtctgacgtggcgcagttgagtaagctgctcgatactgacgatgacgaacgctcgcgcaatctggggttcgggccgctgttgccgctgcgtgaaagcgatggtccaacgttattttgtttccatccggcgtcggggttcgcctggcaatttagcgtattatcacgctatctcagcccgtcgtggtcgattatggggattcagtcgccgcgccccgctggccctatgcaaaccgcaaccacccttgatgaggtatgtgaacatcatctggcgactttgctcgcccggcagccgcatggcccttattatttattaggctattcgctgggcgggacgctggcgcaagggatcgccgcccggttgcgcgcgcgcggcgaaaccgtggcgtttttggggttactggacacctggccgccggaaacgcaaaactggcgggaaaaagaggcgaatggcctcaatccggacgtattggcggaaattgaacgtgaacgcgctgcgtttgtcgccgcgcagcagggaaatgcctccgacgccttatttaccgccattgaaggcaattatgcggatgccgtccgtttgctgacgacggcgcatagcgtaccgtttgatggacatgctacgctctttgtggcggataaaacggtgccggaaggcgtatcgcctgaacagagctggtcgccgtggatagcgtctttggctatttatcgccagccgtgcgcgcatgtagatattatttctccctccgcttttgaaactatcgggcccatcatcagcgaacttattaataaataacgggcgttgtttctgcctttaacaaattaaatcctgaaacccataataattactaattattatgggttttttattgcaactattaattcttttaacataagtgatacatgctacaggcaagtttaattccgaatatttagcttttcgggcactggcgcgtaaagattgtttcggataattctgacttgctgttagaatctctgacaggaatgtgttctttcattggataaatttttcaggtcatacggcatgccatctcttaatgtaaaacaagaaaaaaatcagtcatttgcaggttattcactgccgcccgccaacagtcatgaaatcgatttgtttagccttatagaggtgttatggcaggcgaaacgtcgtattcttgctaccgttttcgcctttgcgtgcgtggggttgcttctgtcctttctgctgccgcaaaaatggaccagccaggcgattgtcacaccggcggagtcggtacagtggcaggggctggagagaacgttgaccgcgctgcgcgtgttggatatggaggtaagcgttgatcggggcagcgtatttaatctgtttattaaaaagtttagctcgccctcgctgctggaagaatatcttcgttcttctccgtatgtcatggatcaattaaaaggcgcgcaaatagacgagcaggatcttcaccgggcgattgtcctgctgagcgaaaaaatgaaagcggtggacagtaatgtcggcaagaaaaatgaaacgtcgttattcacgtcgtggacattgagttttaccgcgccgacgcgggaagaagcgcaaaaagtgctggctggctatattcagtacatctccgatatcgtcgtgaaagagacgctggaaaatattcgtaaccagctggaaatcaaaacccgctatgagcaggaaaagctggcgatggatcgggtgcgtctcaaaaatcagcttgatgccaatattcaacgtcttcattattcgctggaaatcgccaacgccgccggtattaagagaccggtttacagcaatggtcaggcggtaaaagatgatccggatttttctatttctctcggcgcggatggtatttcccgcaaactggaaattgaaaaaggggtaacggacgtggccgagatcgacggtgatttgcgtaaccgtcaataccatgttgaacaactggcggcaatgaatgtgagtgacgtgaagtttaccccgtttaaatatcaactgtcgccgtctctgccagtgaaaaaagatggcccgggtaaagccatcattattatcctggcggcgttgattggcggtatgatggcctgcggcggcgtattactgcatcacgcgatggtctcgcgtaaaatggaaaacgcgctggcgatagatgaacggttagtctgatttacccgaaaagccggatagcgatatccggctttgtcatcagtgtgggcgactatcgccgccccagcggtaccaccagcggcgtcccggcaaccggatcgtcgataatcatacagcgcagcccatagattttttcgataagctctgcggtaacaatctctttcggcgcgccctgtgcgacaatattaccttcgcgtaatgcaatcaaatgcgtggcgtatcggcaggcctgattcaggtcatgcaggacggcggcgagcgtatagcctttttcgcggttgagatcgcttaacaactccagcaaatcaatttgatggctaatatccagccacgttgtcggctcatccagcagcatgatggacgtttcctgcgccagcaccatggctatccacgcccgctgacgttggccgccggacagagtgtctacactttgcgccgccagtgaggtgatacctgttgcacgcatggcactggcgacggcatcggcatcttccttacgccagcgggtaaataacggctgatgcggataccgccctctggcgaccagctcttgtacggtgatatcgcccggcgtggtagcgttttgcgccagcaatccgatgcgccgcgccacctctttactggcgtaacgctgtatttgttcgccatccagccagacatggccgtcaacaggcgtcatcagacggcttagcgtacgtagcaacgtcgacttgccgcagccgttagggccgatgatggcggtaaaatggccgtccggaatcgaaacattaaggttttttgcgacggtatagctgccataacccagcgttaactggtcgccgcgcaaacgggctacggattcggtcattttttgcgggactcctgaattaacaagacgataaggtaaataccgccgaggctgacggtgaccacgcccactggaagctgataaggcataaacagttgctgcgcgcacgcatcggcggccagtagtaataacgcgccgcacagcgccgactgggttaatccccagcgcgctgtgccgctaagacggcgggcgatgtgcggcgcgacaagggcaataaacgagatggggccagccagtgccgttgccgcagcggtgagcgacaccgccaccagcatcagcatcaggcgtgaccgctccacgctaacacccagcgcgcaggcgctgtcatcgcccatctccagcagccgcatacgacgcaccagtagcgcggcgcctgtcagcatcaccataatcagcggcgccgaaggccaggtttttgcccatgtcagaccgttgagcgacccggcgttccataagccagcggtgagcgccgtttccagcgacgcctgcaacagaagccaggtattaaaggcgactaacatcgcgcggatgccgataccgatgataatcagccggaaagtttcaatcccgttacgccaggcgagcagccagacaatcaatgacgtgacgataccgcccgccattgccgccagcgcgatcgcggtaagatgctggccaaacaggaccattgcgaccagtacgccgctccaggcgccggtattaaagcccatcacatcagggctgcctagcgggttacgcatcaacgactgaaaaatcgcgccactgacgccaagcgcagcgccaatcagtagcgccattaatacgcgcggtagtcgccattcggttacgacaagggtgatgttacgcggcgcgtcgcccagcagcgcggcaataatctgcccggtctcaaggggcacggcaccgctttgcaggctccataagccaatggcgaagcagccagccgccagaagcaggcagcttacgataagccgacgagaaagaaacatcacaggccgcctccgctcgatttacggcgtaccagaaagataagtaccggcgcgccgataaacgcactgacgaccgatacgcggagttcgcccggcactaacagacgaccaataatatcggcaaaaagcagcagagcaggggttgccagtagtgttaccggcagcgaccaacggtggtctgcgcccaccagccaacgcgccatatgcggcatcatcagaccaataaaggcgatagggccgaccagcgccgttgcgctgccgcacaagacggtaatcgccagtaaaccgataagttgggtgcgcgccactttactccccagcgccgtcgcagtatcgctgccgaggctcaggctattcagcgcacggctcagaaatagcgccacgatcccagcgataaccacgggcgcaagcgcgactttcaacgtttgcaggctacgaatgtccagcgatcccgcctgccagaagcgaagctgatcataaacctctggatttaacagcgcgatgccgctggtcaatccttccagtaccgcgccaagcgccacgcccgccagtgtcaggcggaccgggcttaactggccgccgccctgactaccggtgaaggcgacaatcagtgatgcgataagcgcgccgctaaatgccatgaaaagctgttccagcggcgtggagaaaccaaacagcgccgcgcccagtacaatggcgaagctggcgccgttgttaacgcccagaatccccgggtcggcgagcgggttgcgagtgagtgtttgcatgagcgccccggcgaggcccaacgcgccgcctgccagtaatccggccagcgtacgcggcaaacgcgcatccaggacgatggtgcaatcggcgctttggcacacgccggtgaacgcctccagcacgacggcggcgggcagcggtttcgcgccaatgaccaggcttaaaaccgcggcgagactcagtaataacaacaatccgggcacggcaaacgcgcgcgtcacggaaaacgagcatgacatagtaacttccctgataatgatagtaattatcgttatctatcttatttggttatgttagcatgtgcagccattgaatggatatttaaaaaaactcgcattaaggcgttgtaatgaatcgacaatcctggctgctcaatctcagcctgttgaagacgcaccctgcatttcgcgcagtatttctggcccgttttatctctattgtctcgctggggctgcttggcgtggcggttccggtacagatccaaatgatgacgcactccacctggcaggtagggctgtcggtaacgttaaccggcggcgccatgtttattggcttaatggtgggcggtgtgctggccgatcgctacgaacgtaaaaaggtgattctgctggcgcgcggtacttgcggtattggctttattggcctgtgcgtgaacgcgctgctgccggaaccgtcattgctggcgatatatctccttggcctgtgggacggctttttcgcgtctctgggcgtgaccgcgttactggcggcgacgccagcgctggtcggaagagaaaatctgatgcaggccggcgcgattaccatgctgacggtacgtctgggatcggttatttccccgatgttggggggcatattgcttgccagcggcggcgtagcctggaactatgggctggcggccgccgggacgtttattacgctattgccgttactgacgctgccgcgactgcctgttcctccgcagccgcgggaaaatccatttatcgcgttactggcggcatttcgttttttgctcgccagtccgcttatcggcggtattgcgctgcttggcggcctggtgacgatggcaagcgcggtacgcgtcctctatccggcgctggcgatgagctggcaaatgtcggcggcgcaaattggtttgctgtatgcggcaattccgctgggggcggccattggcgcgctgaccagcggacaactggcgcatagcgttcgtccggggctcattatgctggtttcgacagtcggttcttttctggcggtggggctgttcgccatcatgccggtctggatcgctggtgttatctgtctggcgctatttggctggcttagcgccatcagttcgttattacaatacactctgctgcaaacccagacgccggaaaatatgctggggcgaatgaacggcctgtggaccgcgcaaaacgtcacgggagacgctatcggcgcggcgctgttaggcggtcttggcgcaatgatgacgccggtcgcttccgcgagcgtgagtggattcgggctggtgattatcggtttgttgctgctgttagtgctgggcgagctacgtcgttttcgccagacgccgccggttagcgatgctggctgatgaaggggcgtttatccgactgaccaaatcggtctggtcagtcggataagactccgataaggctaaaacagggcggcaagccggttaagcaacaatgttgcgctgtaataatccagacggaacgtctccgtacccagggcatagacgcgcttattttgcaccgctggcaggtgcgccagcagcggattggcgtaaagggccgcgacatctttgttgtcgccggcaaacaggaaaagagattcgccgtttaacccggcggccagattttcaccgccaagctgaatgatatcgtggcgcttaccctggcttttgctggtttgcagccctcggggcaatgtcgccagcgtaaagcctaactgtgtcaatagcttgccttgtgctgattctggcgtccacagattggcgctatgcgcggcaggggtatacaccagcgcgctaaccggctgcggcggcagggcgattcgctgtttaaccgtcgtcagttgcgtctcaaactccgctattcgcgcggcggcctgtttctcctgaccggtgatctcgccaagttgcgtgagcaaactctgccagcttttatcgtcataattgatgacgagcgtcggcgcgatagcggagagctgatcgtaaagcgccagcgcggagtcgccgccggtggcgctaatcaaaatgagatccggcatttgcgcggcgaccgtttcggcattcggttcgccgatgtacagccgggcgacatggcgagcctttgctacgtcgctccactggcgcataaacccttgatcgtcggcaaagcggttattcggcgtagtggctccgctggcgacgacgggcgcatcaatcgccagcagcgagcctgtcaacgtcacgctggtagagacgatacgcgcgggtttgtggtccagagtatgaacgccgcggctgtcctggatttgccggggccaaccggcgtcctgggctaaggatattcctgaaattgatataccaaccactaaaagcagccaacgataaaaggcggggagtctcacaatagcgtcctgttattaataaagttaatgcttctcattttcatgtcagcggcagcgagatgcaagccttagtgccatttaactcatgaccagagttgacagagcgacgttttactcttaggttagcgaactaaaaatagaaataataatcattattatacacaaaatcattcaagaagcatcgcaacggcaagggaagaaatccccgcgggcatagataactgtgtgaccggggtttctgatcgcagccaacaaagaggcagcttgaaagatgaagtgtatataagcctttatcattggaggatgatatggatatgtcactggccgaggacgctcaggagacaatggcaacgcttgctcccgatcgctttttcttcatgtcgccgtatcgcagttttaccacttccgggtgcttcgcccgttataccgagcctgcggttgccggagattcgccggatagccctttccagcagaaattgcgccagcagtttgccgaggccaaatcgcagggcatcgccaaccctatcctggtgggggcgatcccctttgatactcgtcagccgtcgtcgctatttatcccgatggcgtggcagtccttttcccgccagcaaaagcagcgcacggcgcgttattttactgaccatcagtcgctgacggtgacggcgcgaaaggcgattccggagcaggatgcttttgaagcgatggtcgcacgcgcggctatgctgaccgccacgccagacgtcgataaagtggtgctttcccggctgatagatatcaccactgatgtggcggtggatagcggagcattgctggagcggctggttgcgcagaatccagttagttacaacttccatgtgccactggcggatggcggcgttctgctgggcgccagccccgaattgctgctacgcaaagagggcgagcggtttagttcgctgccgttagcaggctcggcacgtcgacagccggatgacgttctggatcgcgaggcgggaaaccgactgctggcttcacaaaaagatcggcatgaacatgagctggtgacgcaggcgatgaagcagatcctgcgcgatcgcagcacggaactgcaattaccttcctctccgcagttgatcaccacgccgacgctatggcatctcggtacgccgtttgagggcaaggccaacgccggagaaaacgcgctgacgctggcctgtctgctgcatccaacgcctgcgttaagcggtttccctcatcaggtcgcgaaaaagctgattgctgaactggaaccgttcgatcgtgaactgtttggcggcattgtcggctggtgcgatgccgaaggaaacggcgagtgggtagtgacgattcgttgtgcgaaattgcacggtaatcaggtgcgcctgttcgctggcgccgggattgtccctgcctcttcgccagtcggcgagtggcgggaaaccggcgtcaagctctctacgatgttgaacgtttttggactgcattaaggaacgatgatgcgtatacctttcacccgttggccggatgaatttgcccgccgttatcgtgaaaaaggctactggcaagacgtgccgttgaccgatattctgacccgccacgctgacagcgacaagacggcggtcattgaaggcgagcgcgcattcagctatcgccagctcaaccaggccgcagataatctggcctgcagtttacgccgtcagggcatcaaacctggcgaaaccgctctggtacaactggggaatgtaccggaactgtatatcacctttttcgccctgttgaagcttggcgtagcgcccgttctggcgctgtttagccatcaacgtaccgaacttaacgcctatgcgatgcagatcgcgccgacgctggtgattgccgatcgccaacatacgctgttcgccggggaggactttctcaacacgtttgtggctgaacaccgctctgtgcgggtggtgttattgcgcaacgacgacggcgatcacagcctggacgcggcgatgcggcaggcggcggaagatttcactgccacgccatcacctgctgacgaagtggcctactttcagctttccggcggtactaccggcacgccaaagcttattccccgtacccataacgactattactacagcgtgcgccgcagcaatgagatttgcggtttcaacgaggatacgcgttttctgtgcgcgattcccgccgcgcataactacgccatgagttcgccgggcgcgctgggcgtctttcttgccaaaggaacggtagtgctggcgaccgatcccagcgccacgctctgtttcccgctgatcgaaaaacaccagattaatgccacagcgctggtgccgcccgcggtcagtctatggctacaggctatccaggagtggggcggcaatgcgccgctggcgtcattaaggttattgcaggtcggcggcgcgcggctttctgcgacgctggccgcccgtattccggctgaaattggctgtcagttgcagcaggtcttcggtatggcggaagggttagtgaactatacccggctggacgatagtccggaacggattatcaatacccagggaagacccatgtgtccggacgacgaagtgtgggtggcggatgccgacgggaatccactgccgccgggcgagattggtcgtctgatgacgcgcggcccctatacttttcgcggctatttcaacagtccgctacacaatgccagcgcctttgacgccaacggtttttactgttccggcgatctgatctccattgatcaagacggttacatcaccgttcacgggcgtgaaaaagatcagatcaatcggggcggcgagaagatagccgccgaagagatagaaaacctgttactgcgccacccggtggtgatccatgcggcgctggtcagcatggaagatgaactgctgggagaaaaaagttgcgcatatctggtggtaaaagagccgctgcgagcggtacaggtacgccgtttcctgcgagagcagggcgtggcggaatttaaattaccggatcgcgtggagtgcgttgcgtcactgccgctgacgccggttggtaaagtcgataaaaaacaattacgccagcggttggcgtcacgttcaccgctctgaaggagaaagagagatggcaatcccgaaactacagtcttacgcgctgcccaccgcactggatatcccgaccaacaaagtgaactgggcatttgagccggagcgcgcggcgctgctcatccacgatatgcaggattactttgtcagcttttggggccgcaactgcccaatgatggaccaggtgattgctaatatcgccgccctgcgccagtactgtaaggaacatcatatcccggtctattacaccgctcagccgaaagagcaaagcgatgaagatcgcgcgttactcaatgatatgtgggggccgggactgacgcgctctccggaacagcagaaggtggtagaagccttaacgccggatgaggcggatacggtgctggtgaagtggcgctatagcgcgtttcaccgctcgccgctggaacagatgttaaaagataccggacgtaatcagctcatcattaccggcgtgtatgcgcatattggctgtatgaccaccgctaccgatgcgtttatgcgcgacattaagccgtttatggtggcggatgcgctggcggatttcagccgggaagagcatctgatggcgctgaactatgtggcggggcgttccggtcgcgtcgtcatgaccgagtcgctgctgccgacgccggttcctgccagtaaagcggcgctgcgggcgttgattctgccgttgctggatgagaccgacgagccgctggatgatgaaaacctgattgattatggcctggattcagtacgcatgatggggctggcagcgcgctggcgtaaagtacacggcgatatcgacttcgtgatgctggcgaaaaacccgaccattgacgcctggtgggcgctgctttctcgcggggtagagtaatgaccggctttgatttttcagacaaaacggtatgggtgaccggggcggggaaagggatcggttacgcgacggcgctggcgtttgtcgacgccggggcgcgggtgatcggcttcgatcgcgaatttacgcaagagaattatccctttgctaccgaagtcatggatgtggcggatgccgcacaggttgcgcaggtgtgccagcgtgtgttgcaaaaaacgacgcggctggatgtgctggtcaacgccgccggtattttgcgtatgggagcgaccgatgcgcttagcgtcgacgactggcagcagacgtttgcggtcaatgtgggcggggcatttaacctgttttcgcagacgatggcgcagtttcgccgtcagcagggaggggcgattgtcaccgtagcctcagatgcggcgcatacgccgcgcatcggtatgagcgcctacggcgcctctaaagcggcgctgaaaagcctggcgctaaccgtagggctggagctggcgggctgcggggtgcgctgtaatgtggtgtcgcctggttcgactgacaccgatatgcagcgcacgttatgggtgagtgaagatgccgaacagcagcgtattcgcggtttcggcgaacagtttaagctcggcataccgctcggtaaaatcgcccgtccgcaggagatagccaataccattttgtttcttgcctccgatctggccagccacattaccttgcaggatatcgtggtggacggcggttcaacattgggagcctgacgatgatctggaaacggcatttaacgctggatgaattgaacgctaccagtcagaacactctggtggcgcatctgggcattgtttacacccgtctgggcgatgacgtgctggaggcggaaatgcccgtcgatgcccgcactcatcaaccgtttggtctgctacacggcggcgcatcggcagcgctggcggagacgttgggatcaatggcgggttatctgatgacccgcgacgggcagtgcgtggtcgggaccgagttaaacgccactcaccaccgcgccatctcgcaggggaaagtacgcggcgtttgcctgccgctgcatctggggcggcagaatcaaagctgggaaattacgctctttgacgagcaggggaggcgctgctgcacctgtcgcctgggaacggcggtaatgggatagttctggcaaagtaaaatgcaattgcagcattaacgaagaaaggaagtgatctggttaacactgtaatgtaaaaaatgggtaacaatccggttttatcatgttgttgtgttgttaattacggtaaaggtgttatagaaacaaaatgtaacatctctctggaacacccaaacggacaacaactatgaataaatcagggaaatacctcgtctggacagcgctctcagtattgggtgcgtttgccctgggctatattgcgttaaatcgtggggaacagatcaacgcgctatggatcgtggtggcgtcggtctgtgtctatcttattgcgtatcgtttttatgggctctatatcgccaaaaaagtgctggcggttgacccaacgcgtatgacgcccgcggtacgtcataatgatggtctggattatgtcccgaccgataaaaaagtgctgttcggtcaccattttgcggccattgctggcgcaggtccgctggtcgggccggtactggcggcgcagatgggctatctgccggggatgatctggctgctggcgggcgtcgtgctggcgggagcggtgcaggactttatggtgctgttcgtctcgacccggcgcgatgggcgttcgcttggcgagctggttaaagaggagatgggcgcgacggcaggggtgatcgcgctggtggcctgctttatgatcatggtgatcattctggccgtcctggcgatgatcgtggtgaaagcgctgacccatagcccgtggggaacgtacactgtcgcgttcactattccactggcgatttttatgggcatctacttgcgttatttgcgtccggggcgcatcggcgaggtgtcggtcattgggctggtatttcttattttcgctattatttccggcggatgggtggcggcaagcccaacctgggcgccgtactttgattttactggcgtgcagcttacctggatgctggtgggttatggttttgtcgcggcggtactgccggtctggctgctgctcgcgccgcgtgattacctctctaccttcctgaaaattggtacgattgtcggtctggcggtcgggattctgattatgcgtccgacgctgactatgccggcgctgaccaaatttgttgatggtaccggaccggtctggacgggcgacctgttcccgttcctgtttattaccatcgcctgcggcgcggtctccggtttccatgcgctcatctcctccggcacgacgccgaagatgttggccaacgaaggccaggcctgctttatcggctacggcgggatgttaatggaatctttcgtcgccattatggcgctggtctccgcctgtattatcgatccgggtgtttactttgcgatgaatagcccgatggcggtactggcgccagcggggacagcggatgtcgtagcttctgccgcgcaggtggtcagtagttggggtttcgctatcacgccggatacgttacaccagattgccaatgaagtcggcgaacaatccattatctcccgcgcaggcggagcgccaacgctggcggtagggatggcctacattttacatggcgcgttgggcggcatgatggatgtggcgttctggtatcacttcgccattctgtttgaagcgctgtttattctgacggcggtggatgcgggcacccgtgcggcgcgctttatgttgcaggatttgttgggcgtagtgtcgccagggctgaaacgtaccgattcgttgccagcgaacctgcttgctacggcattgtgcgtgctggcgtgggggtatttcctccatcagggcgtggtcgatccgttgggcggtattaacaccctgtggccgctgtttggcatcgctaaccagatgctggcgggtatggcgctgatgctttgcgccgtggtactgttcaaaatgaagcgtcagcgttatgcgtgggtcgcgctggtgccgacggcctggctgctgatttgtacgctgacggcgggctggcagaaagcgtttagtccggatgcgaaaatcggcttcctggccattgccaataagttccaggcgatgatcgacagcggcaatattccgccgcaatacaccgaatcgcaactcgcgcagttggtattcaataaccgtctggatgccgggctaaccatcttctttatggtggtggtcgtggtgctggcggtcttctctattaagacggcgctggccgctctgaagattgataaaccgacggcgaatgaaacgccgtatgagccgatgccggaaaatgtggatgagatcgtgacgcaggcgaaaggcgcgcactaatctttttacatcaatagccctctccagaataaggagagggcatttgaatgacaggtgacaacgatgttcgatacgctttcgaaagccggaaaatatctgggacaggccgcaaaaatgatgattggcgtgccagactacgacaactatgttgagcatatgcgcataacgcatccggatcagacgccgatgacctatgaagaatttttccgcgagcggcaggatgcgcgctatggtggaaaaggcggctgagggttgccaggcctgataaacgcaacgtcaccaggctatattctgaaaaattcaactttttcaaacgccgcacgcagggtgtctggcgttaacgtcaccggtaaatagtggatggattcgaccgggcgcagggtatgcgcgatgaccctatcgatctcggcggtgttatgaatatccacgtccagttcgctaagccgggccggcagatgaaatcgccggtacgctgtaatcaattgcgccagcacgtcatcttgtcccagtagcgcgctttgcaccagaatgccataagccactttcgttccgtgcaggaatttttccgtttgcggcaggacggtcagaccgttgtgtaccgcatgggcggcggcgacacgggtatagcgttccccgaggccgccgaccataccgccgccagcaataatcgcatccaccacgtcgcaaaatgcctgggtcagccgacgctgctgtttatccgctaatgcttgttcgctgctgtccagcaggagatcgcgaatagcgcacgcgctgttaatgcccagccttacggtcaatggcaatgtttcaggctgcggcgcaagcacaacggcttcataccatttcgccagcgtatcgccaatgccagctaacagatagtcatcgggcgcctgcagaataatgcgcggttcgaccagcaccagaaaattggcatcatcaaaaatttcgaactgtaacgcctgtcccgcgtcgttataccagacggaaagcggtgtccaggcggcgcaggttgccgcgattgtcgggatagcgacaaacggcagcgccagacggcgggcgagcgctttggcggtatcgagcagcgcgccgccgccgacgcctatcaccacctgacgatcgtcgttgcaggcgtgcgccagttgggcaacatggcgttcgctacaatggccggtaaacggcagatgctttgcgccagcacgttcaaacgcttccggcaggtaaggccgggcggcggcaatcgcgcgttcgccgtacacccaaacggcgtgggaaagctgttccggcgtgaaaaagtcggtcagtctttcgaggcttcctgcatgggaaaaataattcgccgggccggtaacgacgcggatctcagtgtggttcatgttgtgttgtccttagggtcttctcaccgttgttattatatttagacatctaaacgtcttgattgccaaatactaacaccctgtgatagtgtgtcaacaaccacatcactggcgggtatgaagataatgagaaataacccactgattccaaaaagcaaattgccaaatcttggtaccacgatttttacgcaaatgagcgcgctggcgcagaaacatcaggcaataaatttatcgcaaggcttccctgattttgatggtcctcgttatttgcacgagcggttggcttatcatgtcgcgcagggcgcgaatcaatatgcgccgatgacgggggcgcaggcgctgcgggaggccattgccgataaaacggcggaaatatatggttatcgacccgatgacgtcagtgatatcaccgtcacagcgggcgcgacagaagcgctgtatgcggcgattaccgcgctggtgcgggcaggggatgaggttatctgtttcgatcccagttacgacagctatgccccagccgtggcgctctccggcggcgtgttaaaacgcatagcgcttacgccgccgcattttcgcgtcgactggcaggcgttttcggcgttgcttagcgagcgcacgcgactggtgatcctcaatacgccgcataatcccaccgctaccgtctggcgtcaggcggatatcgaggcgctgtggcaggctatcggcgagcgggaaatttatgtgttaagcgatgaagtgtacgaacatatttgttttgccgccgaaggtcatgccagcgtattggcgcaccctcagttacgagagcgggcggttgccgtttcatcgtttggtaaaacctttcatatgacaggatggaagattggttactgcgttgcgcctgcggccattagcgccgaaatacgcaaagttcatcagtacctgacgttttgcgtcaatacgccggcgcaactggcgctggcggatatgctgcgcgccgcgccggaacactatcgcgcgttacccgatttttaccggaaaaaacgcgatgtgctggttaacgcgctggcgcaaagccgattaaaagtgctgccctgtgaaggtacctattttctgttaatcgattacagcgcagtgtcgacgctaaatgacgttgagttttgtcagtggctaaccgaagaagtcggtgtcgccgctattccgctctctgtcttttgcgccgcccctttcccgcatcagcttatacgtttatgtttcgctaaacaggaatcaacgctgctggccgccgcagagcgcctgtgtaaactgtagttatttaaccgtccacgctctggagaatcgacggtctgcaaaaagctcctgcaggccgttgatctgtttcaggcgcaggacttcatcggcgtccatacctaactcctggccgattttgctctcgtcccagcctagcagagaaagttcgcgcacgatttctgacatggcgtggatctggtggcgcccgcgcgcgcggttatgccgaatggttgccgccatgcgttcgtgacgttctctgtccagacacgttatcggcaggtagcctttcagacgccttttcagggccgcttttcctttgcccagctcatgacggtgaaaaccgtctacaatctcgtactcctccgtattggcctttaccaccacgatcggctgagtaaacccatcttgttcaatcgatttaagcagcagttttttctccggcggcgcaacgttattcgggttgtagtcattaggtgaaatatgatcgtttttcacccacaggacacaatcgacaggctcatcgcgaaaaggactaacgctatgtatcgccattctaaattcattaatggcggcgatcctctcctcttcaggcagttcagagagaaagtgagttatttcggttgtgagtcggtgttgcataagatcccccattcctggcgtttagctttcatacgttcgttataacgctggtaattcttaggttttgtcggactgaatgacagcgcccggcaccagtaatcattgttcagtaatactttgcagatccgtcgccacgacggaatatcgcgcgatccgatatcgccatgctgcgtttgtggaatggtgtgcatgccttttttcttataccactgcaaataaacggcgattttattacggtaatgttcggcagtgacttcaggcatactgtgtagcaggagcagcgcgtactcttcccagttaaggtgatcgggttttaaaattttccggtggccgtaaaaatggctgtcttgtccggcgtatattcctccgctgagtgcgccgctgactctggcgcacatggccgcccagcgctcaggttcgataacatgatacagccataacccctgtcgttgttccgggccgaacggttcgcaaatacgcatgtaacggggcggtactccagcctgatacatcaaattatacaaagggttacatggtttacctgttttggcgaaccaggtccagatatctgcggttttccagtcatagatgggatagatataccaggtgtgccccttaggggctaacgtggtccagggcttatcgtcggcaaagcgcagcttatgcgagttagcgatagcggcaaatcggttataggattcgtcggaacgaataccgaccagcatagcggcaggacgtttttctgaaaaccagtcggcaaaatcgcgaacgaactgttcaaaggtcatgccgtgttgataaaaggaaaaaaaggccggatcggtaatcgcatcttctggcggttgtcgtacccagtcggtacccggctgccaacactgccactccggctggtattgtgaaagggaattttgtgtggttaagggtaatgcgacccaataaaaacgctcaataacgtccgcgtagtattcacgtaacgattcaatataggtgatggtacaggagaattgcgcttcccagtcaatgaagagaacatggatctttttattcattttgcgcgccaacgttgccgtcaggtgcaacataagtcctgaatctttaccaccagaaaatgagacgcagacccggggtaaggtttccagggtccacattatacgctcttgagccgcttccagaacattttgctcgagcggaactttataaaccgacatctctggatagtctccgatgtgttaactacagtatattcgaaataattaacataaaggataagcagattagatgaacttgcaatgctttattatatttgtaaaataaatatattccataaacatatacattaaatttatattaatatccgttatctgaccttcttattaatgtttttttgtgatgtgctcaatgagctcagcaaatccgctattattcagcgaagccctattatacataagatagaattgtatgggagcaatggtaaaaggtatggtgacttttttaagtttgatagaggaagagtaatagtcaaaaaatgtttgtggtaaaaaaccaataagctccgtggagctgatagagttggcgatggtcatcagcgatttgcttctgaaaccaattattctttcccccagcacatcatccataagtgaatgatattctttcataccggttgcccgggagacgagttgcgtaaatgactcttgtagaatttcgtcgatagtggcggtgtcgcctagtcggggatggttttcactgcaaaccaggatgcattctagcctattaaagtgagtacaaacaatagaacgattattcagtggggccattgaaaccacaatatctgctttgcggtaggcaagcagatcttcaggcagttcgtcagtggtcaaaatgtcgtgatgttcaatttcaacctgtggatctttgcggatatatttaactaatttcatcacatattgggtgatcaacagctgtgggctgtagataataaattttttcttcaggctggactgattcattatattaatagtttgttccaggctgttaagattattttctaaatgataatgtaaattaatgcctgttacggtaggcgtaattcctttgcctgaacgaataaatagagggtcgttgaattgcgtgcgcaggcgttgcaatgactggcttacggcagaaggtgtaatatagagtgtttctgctgctttgctaatgcttaaatgttgatagatacattcaaatataaccaacaggttaagatcaaattttttaaggtcgtaaaggttagccatagtatgttcccggcattatcatggtatcttccatgattatgacttaatctcaataatttaccagagttatgtttattaaacttaatgtagagtttatttaaactaaaataccacagttatgaatattttagcgagtaaataattacagtaaaggcggacataacgtacacttttataaccacgccgttagtctaaaaaggctgtgtcggatgacatgctggtctggcgtcgcgttaatgccagtcagaggttggcccgacaaacgtagcgctatcgggcgtggtacggttaagctccagctttgctaatttctgcgttaaggctgccccatcatggcgtccagttgcgctttttccggtaaacccacaacctgttgcaaaatcttatctttattcatgtaataaattgctggcgtcgcgttagcgccaagatcgtccattagctgctgattctgattaatgactttcatctgcgccggggggatggacgccggaacttccagcttcatctttcctgcggaggcttcatagttatgccaggttttcgccgggtctttcgcggctaaaatcgctgcggctgtggccgggctttccggtttaatcacgccgaccagtaatgtgcgtaattgtaccttgccggattcgacccacggacgagcttgttgccaaaactgcttacaataggggcagaaagggtcggcgaagacatacagcaccaccggcgcgtcttttttaccgtcgagtatccatgacgctttttccattttctgccacatttcacgtccggccggtgcatagatctctttttctatcagggcgttgctaagattttcgcctttttcattatacatatagccggaaatcgcgtgtttaccgtccggcgtcaggtaaatcgtgacgcccatatcctgatactttccgagatagcccttcatgccccccggcgcctcgaaggatttcaggatagttataccctgtttttcaatggctttaaccggcgcaggcagttcttccgcgtgggcgagaatgggcagcatagcaagcagcaatgtacgtttaatcatattttttccttttaatatcaaagcgaaaagagtattaatgatgatgcctatcacagacataggtaagagctggcgtgccaggattgccctttctgtgctggggtgatgtaatccttttcgctgttacagcctttgttaaggtaatgtagagcgcaacacttagccagcatatacgctatggatttcgagttgcagacaatacgtctgtaatttgcaagacgagtcgtactggctctgaagttacctacgggtagttcaggtaatggggccgcctgtcaggcggcctttttactttagatggctgacagggcgcagtgttcacaatgtcgcccgaatcgggttgttagttaacgcttattgatttgataatggaaacgcattagccgaatcagcaaaatttcgttaacttactcctcaacgaaaacacggaggaagtatagatgtccttaattaacaccaaaatcaaacctttcaaaaaccaggcgttcaaaaacggtgaattcattgaagtcaccgagaaagataccgaaggccgctggagcgtcttcttcttctacccggccgattttacctttgtttgcccgactgaactgggtgacgttgccgaccattacgaagaactgcagaagctgggcgtagacgtttattccgtctcaaccgatactcacttcacgcacaaagcatggcacagcagctctgaaactatcgcaaaaatcaaatatgcgatgatcggcgacccgactggcgccctgacccgtaacttcgacaacatgcgtgaagatgaaggtctggcagaccgtgcgacctttgttgttgacccgcagggtatcatccaggcgatcgaagttaccgctgaaggtatcggccgtgacgcgtctgacctgctgcgtaaaattaaagcagcacagtacgttgccgctcacccaggcgaagtatgcccggcgaaatggaaagaaggcgaagcgactctggctccatccttagacctggtcggtaaaatctaaatttccgtcgtctttcacgccatagctgcgttggcgtcgcctgctcaccccggtcacttacttcagtaagctcccggggattctcaggctagccgccttactctgacgtgaaatactttggaaattgtttcagtcatgggcgcacccgcgcccatttcatttcagcaccatgacgcaagttgcattaatgcagtcccgcgaagtcggcttgcatgatgatgttttcagagagggaagaagaatgctcgacacaaatatgaaaacccagctcagggcttaccttgagaaactgaccaaacctgttgagctgattgccacgctggatgacagcgctaaatcggcggaaatcaaggaactgctggctgaaatcgccgagctgtccgacaaagtcacgtttaaagaagacaatactctgccggtgcgcaagccgtctttcctgattacgaatccaggttctcagcaagggccgcgctttgccggttctccgctgggccacgaatttacctcgctggttttggcgctgctgtggaccggcggtcatccgtcaaaagaagcgcagtcgctgctggagcagattcgcgatattgacggcgattttgaattcgaaacttattattcactctcctgccataactgcccggacgtagtgcaggcgctgaacctgatggcggtgctgaacccgcgtattaaacatacggcaattgatggcggcaccttccagaacgaaatcaccgaacgtaacgtgatgggcgttccggcggtatttgttaacggtaaagagttcggccagggacgtatgactctgaccgagattgtcgctaaagtggatactggcgcagaaaaacgcgcggcggaagcgctgaacaaacgcgatgcgtatgacgtactgattgtcggctccggcccggcgggcgcggcggcggcggtctactcggcgcgcaaaggcatccgtaccggtctgatgggcgagcgcttcggcggtcaggtgctggataccgtggatatcgaaaactatatctcggtgccgaaaaccgaaggccagaaactggcgggcgcgctgaaagcgcatgtcagcgattacgacgttgacgttatagacagccagagcgcaagtaaactggttccggccgcaacagaaggcggcttgcatcagattgaaacggcgtccggcgcagtattgaaagcgcgtagtatcatcatcgccaccggcgcgaaatggcgcaatatgaatgtgccgggcgaggatcagtatcgcaccaaaggcgtcacctattgtccgcactgcgacggtccgttatttaaagggaagcgtgtggcggtcatcggcggcggcaactctggcgttgaagcggctatcgatctggcaggtattgtagaacatgttacgttgctggagttcgcgccggagatgaaggcggatcaggtgctacaggacaaagtgcgtagtctgaaaaatgtcgatatcattttgaatgcgcaaacgacagaagtgaagggcgacggctcgaaagtggtgggactggagtatcgtgaccgtgtcagcggcgatattcatagcgtcgcgctggcagggatttttgtgcagattggtctgttgccgaatacccactggctggaaggcgcgcttgagcgtaaccgcatgggcgagatcattattgacgccaaatgtgaaaccagcgttaagggcgtcttcgccgcaggcgattgcaccaccgttccttacaaacagattatcatcgccacgggcgaaggggcgaaagcctcgttgagcgcctttgattatctgattcgcaccaaaatcgcataaaaagaagtaagcacacctgcaaggccagttaactggccatcgtaaatggcccgatagtgtaagctattcgggcctgcggtgtttatgcctggggaacgcaccgggtaaaacaccttcttcattatcaatactctgaaaccgtctgttaataacagacggttttttatttcaacggtattctgtttttaaactttgaaacaataaaaaagccttctacggatttaactggaatttttctgtttttttatcaaagaaagattaagcgcttccgttaacatgcccattcttttttcttgatttatattgcatttgtatgtgaggttatttattcatggattcaatctatgaatcactgacggaattagaaaaaacagggcttacattgcgtgatttttttaattctcatgatagtcgttcactgaaatctgcctacgtgagattaaatcccactgctgcggtaaaccttaccgatcgggcgtggctggaggcggagtatgactttaatgcgctattcgtcggtcctggcaagctgctggctgcgcctttcgcttcagtgtatctggaagatgatgcgctggtgatgggaaaggcgacgctggagatacgggattttatggcagcgttgggattatcggttaatcaggagagcaatatccctgacgatcatatttcctgcgtgctggaattgaccacactattactggctaatacccggcaaacgtcaccataccgctctactctcactcaatatatcaataactatttaacaaagtgggtgccattatatatcgaaaaaataaaaactcatgcacaaacgaccacgttatatacggtggcggacatcttattttattggcttgctgaattaaaacgagaatatcaatatgagtaatgagacgggacatctgaacagacgttcttttttaaaggggatagtggcactgggcgccgttgcggctttacccggaggattactgacctcccgatgcgcgcttgcgcagccgcctgttccctttaaccctaaaacgtacaaaatttatcgtaacgcgtgtccgcgtaactgctatgacacctgtagcctcaagacatgggtaaaggacggggtcattactttcgtggaaggtgcgccggaatcaacatttactcacggtaccccttgcgtcaaagggttaagctatccgcgccgggtttatagccccgatcgtattaaatatcccatgacgcaggacgttcgcggtagcggcaactggcgtcgcatctcatgggaagaggcgatgcagcgcattgccgccaaaatgctggagattaagaaaaaagacggttctatgctcggtctggcgctgaccaaatattccggtaagtttggcgtgctgaactatgccgttgaagggatgatgtcctcgcttggctataccacccgttttgccggtacgccgtgctggcctgccggtatcgacgcgcaaaactacgacatgggcgacatgtggtgtaacgacccggaagatatggtgaaagcgaaatacatcattatctggggcgccaacccggcctggtgctcaatgcacagcatgaagtacatctatcaggcgcgcgagaaaggggcgaaggtcgtggttatcgacccgctgctgtcgcagactgctgccaaagccgatctctacctgcgcgtacggcctggctcagacggtgcgctggcgctgggaatggcgcgtcatctggtggataaaggcctggtggatcaggattttgttaacaacgatgctcacggctatccggaatttgaagcctatctgcgtaaccatgtaaccgtggagtgggcggcagaaatctgcggcctgtctgcggatgtcattcgccagctggcggaagagtttacggcggttaagccggccacggtctggattggttacgggatgcagcgtcatgtcaacggcggcgccaacgttcgcgctatcgatgcctttgtcgctatgtccggcaacatcggtgtcgaaggcggcggcgcgcgttatggccatctgcatacctggggctttaactataacgccatgctgcagaagccgccggtgggcgctattggcataccgggagcggcgggcaccaccagtgaattcggggctgccgctggcagcgacgccgtgcagtactccgatcgctctctgaatatcaaccagacggcgcaggggattctggaggccaacgatccgccggttcgtatgctgtgggtcgcctgtaaaaacccgtttgcccaggatttcgatcgcagcaagatgaaaaaagcgtttgaaaaactggaaatggtggtctgcgccgatcagttcttcaacgaaacggtgcaacacgctgatatcgtgctgcccgttaccaccgcgtttgaagagtggaacgtggatgcttcttactggcactactggctttccattaatcagccggcgattaagccgatgtatgaagcaaaatgcgaccttgaaatcgctaccatgctgtcgcgcaccattaataagatggcgccgggttcctgtaccttcccgcaagagttcgatcacaagcgttggctggatcaggagttcaacgacggtatggcgaaaatgttcggcatctcttcctgggacgatctgctggacgggccgaaaaaagcgattctgccaagttcagccgcctggtacgatcgcaagttcaaaacgccgtcaggcaagtatgaatttaaatctgaactggcggagaaaaacggccacaccgcgctgccggaatacaaaccggaagccgagagcaaactgccgttccatctgtttacgccgcacgtgcagtttggcctgcactcgcagtttatcaacctggactggatgcaggtgttctacccggaaccgttcgtttatatccatccttcttccgcgaagaaaaagggcatcagcgagaacgatctggtcaaagttttcaatggcaccggtgaagttgagctgcgggcaaaagtcaccaccaacgtgccggaagattttctggtgatgtatgaagcgtggttcccgaaacggcagtacaacgtgcaaaacgtcgtggccgatacgcctgctgatatggggctgatgaaaactggcgcgccgggcgccgctatccacagtcagtttgctgacgttgtattgatcggtaaaggggaatccgtagcatgagacgtgcgtttttagtgaatagcgataagtgcatcggctgccgcggctgtgctatggcgtgtaaaagctttaaccaactggagccggatcgcttctggcgctacgtttatccgttggataaagacatctatccacatgaagagcgggcgttttactcgctggcctgtaaccactgcgaacatccggcctgcgtcgccgcctgtccggtcgaagcctataccaaacgtgaagatggcgtggtggtgcataaccctgagcgctgcatcggctgtaaaaactgtattcgtaactgtccttatggcgcgccgcgttttaatgaagagacgcgtaaagcggaaaaatgcagtatgtgctacgagcgtcttgatatcggtatgaatccggcgtgcgtaaacgcctgtccggtgggcgccttgtcgattatcgatttggatgccgatcctgtgcccgataatgcggtgcagtatccgccagggttcccgcatatgccacagcttaatccaggaacgcgctttattctggcgcgccagcctaagcagccggaggacaagtaatggaaaaatatgaactgccgctggtgttttttacggtattaagccagatgtctgtcgggatggctttggtactgacatggcgtacgctgcgtggtgaagtggaaggccagcgtttctattggttggccaccgggctggtgctggcattggcgtctattgccgcgattctgcatctggcgcatcccgatcgcgcttatgatgcgctgattaacctgcgacatgcctggttaagtcgggaaatcctgggcgccacgttgtttggcgcagcggtcggcgtaacgttcctggcaaagggacataaagcgatggctcttatcgcctccgtgttcggcgtgttactggtggcggtgcaggggatgacctacgccgcgccagcgatggtggctatcgctaatggatttaccatgctgttattttttattacggtatgggtcatgggttgcgcggcgattccgctgttaaaactcaggcctgccgttcctgcgttacgccaggggattgtggtgtgtatcgcggtacttatcgcggcgccgctggtgtggttaagcgggggaacggtaatgcagatgacggcgcgttcatggctggcttcaccgttttatctggcaagcctggtctgccttgcgctcgcttttgtcgccagccgtcacggtgattcgcgcccgaaacgcctgttcgtcttgttattcgtcggcgtatttctgagtcggctggtcttttttggcgacacggtgagtactattgtgaatatcgggcatttgtactaacgatgatgcagtaaaaagccctgccaggcgtgacctggcagggcgtgtaagtttttagccaccagagttaacgcacaaccaatacgggcagcgtcgcatggcgcaccacgcttgaggcgttagaccccaacaggtgtgtcgtgatggacggattacgcgaaccgattaccacgacatccgcatccagttcttcgcccatctcattgacgacatcgcgcacgctaccaaagcgaacatgcgttttaattcgtgaaggatcgatactgaagtgtcccaccatcgtttgcagacgcgtttccgcctcatgctgtaaatgttcttcaaagcgacgcacgtcggcggcaaagcggtgcagactcatgctcgcggacccaggcagtacatgcaacagatgaatgacgccatcctgttgcgccagaaactcagcgtggcgaatggctttatcgctaagttccatttcaaaaacatcaaccggcataatgattgtcttatacatacccgttactccctgttaatcaatactgaatttattcaagcatataataatgtttctttctgctatttgtctggcaattttaaatattacggcaacctgatgttaaaaaagttgtgtattttccaggaaaaatcctaaagccgcctgttttgccggcagtctctccgggatagctacccttttatagtcgaacgtgacattcaccgttaccccggaggctgcatgaaagcattgacgtatcacggtccacatcacgtaaaggttgaaaacgtacccgatcccggcattgagcagcctgacgatatcattttgcgtgttaccgccaccgcgatttgcggatctgatttgcatctctatcgcggcaagatcccacaggtaaaacatggtgatattttcggccatgaatttatgggcgaggtggtggaaaccggacatgatgtgaagaatattcggaaaggggatcgggtcgttatcccgtttgtcattgcctgtggtgactgttttttctgtcggctacagcaatattcagcgtgtgaaaacactaacgacggacacggcgcggcgatgaataaaaaacagatcccgccaccggcggcgctgtttgggtatagccatctgtatggcggcgttcccggcggacaggccgaatatgttcgcgtgccaaaaggtaatgtcggtccatttaaggtgccgccgctgttatctgacgataaagcgctgtttctttctgatattttgcctaccgcctggcaggcggcaaaaaatgcccagattcagcaaggtttcagcgtggcggtttttggcgcagggccggtaggattactgactatcgcctgtgcgcgactgctgggcgcggagcagatcttcgtcgttgatcaccacgcctggcgcctgcgtttcgccgaagaacgttacggcgcgataccgatcaacttcgatgatgagaacgatccggcggaaaaaatcatcgagcagacggcaggacaccgcggcgtggacgcggtaattgatgccgtaggctttgaagcgaaaggcagcttgacggagacggtgctgacgaaccttaaactggaaggcagcagcggcaaagcgctgcgacaatgtatcgcggcggtcagacgcggcggcgtggtcagcgtgcccggcgtgtatgccggttttattcacggctttttattcggcgacgcctttgataaggggctaacttttaaaatgggtcaaacccatgttcacgcgtggctgggggaattattaccgcttattgaaaaagggttgctgaagccggaggagattgtcacgcactatatgccgtttgaagaggcggcgcgcggctacgaaattttcgaaaaacgcgaagaagagtgccggaaggttatcctggtgccgggagcgacgtcggcacaagcggcgcagaaacaggcgacgggagtagtcaacccgatgccaggcggcgttgtctgaagcaggcagaaatgaaagggctaacggaaagaggatgcgcaggcatcctctgtgtaaacgcattaacgcttatgcagatgatttaacgcaggaagtcgcccgcggcttcaggctgatattcgagttccagcacttcgagatgggtggaggcgccgcccggcagttcccagtgaatggtgtcgccgacgcgcagtcccagcaacgccgcgccgacgggcgccattaccgaaagctgggtactgctgtccgtcatattggcggggtacaccagcgtccgcacgcgtgtttcaccatcgctcaaattgcggaatttaacgcggctgttcatggtgacgacatcgttcggcatctcttgtggcgaacacatttgcgcgcgatccagttcggcgttgagcgcgtcggcaatcggcagatccgcatacgcaggctgttccagaagacgatcaatacgttcggcgtcaaggtcgttaatgataatagtgggtctggacatttcttactccatgtcatcgatactgcgagtagtgcaggtaaatggtcccaaaagaaaaccctcaccgtctggcggcgagggtttaactctcatgatgatactgagacttaccccgtctttgaagtgatttagttcacattcgggtaaatcctcaaacgtcatagccctgagtgaattttagtctacattcgggcgtgttctcaaatgtggctacggttttaaacctctgcttcgtcaataaccggctttatcgataataaactgtttcccgcagttgccgggatgcggctgcggcaggaatgaggcagaggagagcggggcgttaatcatcgacgcctttaatgaaaactgaatctctgttaaataggcgggattgccatggcagtttactttaacggctttgacattatcctggccccacatttgtgcgacgacgctatcaaactcagcgcggctaacggttttgccgtaattatccgtcagaaactgccccagtgcgctgtcttttatcgccttatccagccgtatcatggtgccgaaataggcattgggatcaaacccgaaacaggcgccatgtttggcatattcgtagcgctccagacaggaattcccccccgcgccgggcatcacttccttaagcgctgccgcgatgtcaggcgaaagtccgggggcggaggctgagcatttccggctggccttgacttcaggcagattcgggattggccgcgtcgcacaaccaaagcgctgccagcgtctctggtcaacaccgcgtgcggcgatagatttgggtaatcctggccacaggccgtggacggtcagaaagtctgctttgttggctggctctttttgcagacggcactcatcgggctcccgatggcggcgttcatgctggctttgacaaaaaccggtttgccaggaaagcgccagcacatagtcagtgaaatcaccgtactgttgcgcctgaagttcgtcggcgttggcggcaaaaatcggggttaagagggcagccagcagcggactgtaatgccatattgtgttcatgatgaattcgataatttatacacattatgaatgttacccatttaatcataaaaaatgccgctcaggtgaacctgaacggcatcatttttaacctgcgttggcgtaatgtttaattccacattgccaaaatcggccagcccaccagcaacagcatcgcgatatagataacgccaaagattgcgccaagccgccagtagtctctggatttcacgtaaccgcagccgtagataatcacaccagggccggtggcatacggcgtcagacagcccatgataccgatagacagcaccagcagaatacacagttgttccatcggaacgcccggaatgcctttacccaccgccagaatgaccggcagcatggtcgcggtgtgagcggaaagactggcgaacagatagtgcgcgaaatagaacaccagtaccagtacaatcacggttgcatccggagagaaaccttccagatgcgtactcatggtattggcgaaccagtcaataaagccggagcgggttaagccattggccatgaccaccagcgtagcgaggttcaccagggtgttccaggcgctgttgtagcgcgtaatatctttccacggcacaacatgcaacgccagcatcagcgagacggccagcagacccacggcagtggcgttgatgatttttccaccaaaaacccacaatcctaagctaagcagcaccaggccaatcagcgtccactctttgcgggacagacgccccatgttttttaactcgccgccagcccaggccgcgacttccgcactgtgggtcacttcaggtttataaagtacataggagagccacggcgcaacgatcagtaaaataatccctaccggcagaaagctgagaaaccactgcagccagctaatctggacgccagcgatcttgctgacgaactccagacctaatacgttcggggccgcgccagtgacaaacatcgaagagctcaggctggtactgatcaccatcatccacatcaaataaccgccgatgcggcgtgcggaaggatcgtttggaaacgatttaaacagcggcggcaggttcttgatgaccgggaagacagtcccgccggtacgagccgtattggagggagtaaacggcgccagcaaaatatcgataatgacaatcgcatagccgagcgtcagcgtgcgtttacccatgaattttaccaaaaacagcgcaatgcggcgccccagcccggtcacttcgtagcccagcgcgaaaataaacgcgccgaaaaccagccagaccgtggtgctggagaaaccggcaagcccccatttcagcgcctgtttactggctttaaacgccggatcggccagttctgaagcgtcaaatagcaggtaattgctgccgataacgcaaatggttacggcgataaaactgatcgctgtcgccgggatcggctccaggatcataccgacaatcatcgcgacgaaaaccgcaaaatagtgccaggcctgcggcggcataccatctggaacaggaattaacaacatgacgcccatcaccactaatggggccaacaacttccatatattatctttggataaagacataaatgactctccggaaaggatattttctataattgtgttaatgattaacttgcgaaatttgcgctaaaaaccaggtcacgatcagcagatcggcgctaccgcctgggctgagattgcgttcaatgcattgctgatcgaaccggtggagataaacgagatcgtcaggcgtccgtatgccgccctgctgtaataagaccgcagcctgctgctgtaaccagcgcagaccgtccgccccgccgcgcgacgcgacgttggtatcgccgttaagcgacatcagcagcagtaaggtatcaagcagcgccagttcgggatcgcgcccctgcgccagcaatgcgcggtagtgcggcaacgcgtggcggatgaccagcggatagcccgcttccgcttcaccgcgcgcgccggttaatcccagttgctgatacagccgctggcctgcggtgagctgtaggttgttctggcgcagttcgcgcgttgtcaggccgcggcaaaaatcggcggcggtagcgcagagtgtttctgcggcgatcggctggcgtagctgatacaggcggccaatggcggcgcacagtaaccccagcgagaaaatgctgcctttatgggtattgacgcccgccgttgcgcgaaacatcgctgcttcacaggccatccccaatggacgcaggcccgccagaactgactctggcggcaggcgcgtgcagctggcgccatattccataaagcgcggcagccagtgtcgaatcgcctccgcgctgcggtgaaaatccgccagcgccatatctttgtgcgcgccgcagtttagtcggtctaccagaccgggttttggcgataaatttacctcggtcagcatggcgcgccaggccaaatcggcccagacgtcatacagcgactgaggctgaatggaggcgttagtcgggttggcgggaatcggcatcatgcagcagcgcctccatatgaatcagtaaatcagtcagcgcgtgggttttaccccgcgcgcattcagccgcgctttgcccgcacagcagacagcggcgagcgggaagcgcgaaatggcggcgggagagtatttcgccttccgccgtcaggacatcgatatcccacaggcgccccagtggataacgctgttcaagcgcgatggtcgcctgtttgagcgcctgagcgggcgcgtcaatcgccagcagcccttccggcccgctggcggaagccagtgcagcctgctcccggatagtccagccatactcttctgccagcgtgtgcagggcagtcacgccgtgattaaagatccggcgggttaacgcgctgtcttttatcgggcctggcgccaccacggtaaaggagaccagtggagtggcgtggcgcgttagccaggcgcgctgtcttgcttgtctctcatcccggctggcgagcagctcaggaatagaaacgtcgtgacaggtggcgagttcaggaaacaggcgcatggcttattccttcacctgatgcaccacatcgatcactgaaccgtcgcgataacgcacgacagcaatcacgcggtcggtgaattcgatagggcggggctgaccggtaagcagttgcgcgcgttcgcgcagccactcaatcgataccactttcattcccgctgctttcaggcgttcagccagctccggacgcgccggattgacggcgataccgtgatcggtgaccagaatgtcgacgctggagcccggtgtgacgcaggtggtgacgttatcaaccagcgttgggatgcgaccgcgtaccagcggcgcgacgatgatggacagcgccgccgcgacggcggtatcgcagtgaccgccggacgcgccgcgtagaacgccgtcggagccggtcagcacgttaacattgaagtgggtgtctacttccagcgcgctcagtaccaccacgtccagacggtcgacggaagcgcctttagagccccagttggcgtactggttagcgctgatttcgatatggttcgggttgcgagccaaagattgcgcagcgttacgatcgaagctctgaacgtcaagcagtttgcggattaagcccttttcatgcaggtcgaccatggtggcggtgataccgcccagcgcgaaattagccacaatgttgcggctacgcattttgtcttccaggaagcgggtgaccgccagcgatgcaccgccggtgccagtttgtagggagaaaccttcgttgaagtagccggagtgagcaatgacttccgccgcgctgcgggcgatcagcagttcacgcggattagtggtcatgcgggtcgcgccagcgccgattttgtttgcatcaccgacttcttcgatttgcacgatcagatcaacctgatcctgagcgatgcttgccgggttatgcggatacggcagcagttgctccgtcagcatcacgacctgcttcgcgctgtcggcatccaccatcgcgtagcccagtgaaccgcaacaggctttgccggtataaccgttagcattaccgaattcatcgcaggagggcacgccaagaaatgcaacatcaatattgagttcgccgctttgtaccagatgtacacgaccgccgtgggagtgaatctgaaccggctcagccagcaagccgcgagaaatttcttccgccagcgggccgcgcaggcctgacgtgtagatgcggctgaccaccccgttacgaatgtgttcaaccagcggcgcatggcagtcgctcagcgaactggaggccagcgtcaggtttttgaagcccatcttcgcgatggtttccatcaccaggttaatcgtcagatcgccgccgcgaaacgcgtggtgaaaggagaccgtcatgccgtcgcgtaaaccggaacggcggatggcctcttccaggctggcgcacagtttgtggtcgcgcggtttttgcgcttgtagatccaattttgccgcactttggtaagcgctcagttcgctttcagcgtgacggctccaggctgctacgcgatcctggcgttgagattcatttttctgcgtcatttttttgccttattcttcgcgaataccggaaagttctgcacgggagagcaccagacgggcgcgttcaatcaccgggctgtcgaccatcttgccgttaagggaaacgacgccgagaccttcgcgggcggcggcttctgcggcttcaacgaccagacgcgcatgggcgacctctttacgcgttggcgcataaaggttgtgcagcagttcgatctggcgggggttgatcagtgacttaccgtcaaagcccaactgtttaatgtgggcggcttcttgcaggaaaccggcttcgttgttggcgtcggaatagacggtatcgaaggcctgaatgccggcggaacgcgcggcctgcaaaatggcgcagcgggcgaacagcagttcggtgccttccggagagcgttcggtgcgcaggttgcgaacatagtcttccgcgcccagcgcaatcccgatcaaccgttcagaggcgtgggcgatttctaccgcgcgggtaatacccagcggcgattccacggcggctaacaggccggtactgcccggttcgcgaccgcaggcgttttcaatgcgcagaatttcgttttcgatatcaatgacgtcctgcgcggtgtcggttttcggtaaacgcaccacgtccgcgccgccgcgcacgaccgcttccagatcgttgacgccccattcggaatccagcgcattcacgcggacaatggtttcgacgtcacggtaaagcgggtgttgcagcgcgtgatataccagacggcgcgccgcgtctttttcgcgtaatgcaacggagtcttccaggtcgaacatcagcgcgtcggccgggtagataaacgaattgctcaccatcgccgcgttggcgcccggtacgaataacatactgcggcgggtgcgggttttacgttgttgcagagaggcggaaatcattggcgatcctcccagggcagagcggcaataccgctggcgcgcgccagtagcgtttccagtcgggcgcgcaaaatgcagtccagagcgcctttatcatcgacgttcagttgtacgccgcgcacgtcgtagcgagaaagcacctccaggatggtggcgcgaatggcctcgccaaactgtttttcaacgctactgttgatttgcaggtcaatatcctgcgtatcgagcggcgcaatgcgtatcatcacatcgccggactcaagcgtgcctgcgacggctagctggtttattttcatttttcacctgttgctaatacgggggacttttgacgggctgccgcgctgcccggatggcgttcgaccatgccctgcaaatagcgcagggtggcgtcgggaaccagcggcgcgatagccgtgagatcgtgtttaaccagcagcttgcgtacccaggaggcggatatcggcgtctcctggaagcaaagccgctctatttccaccagcgtaatgggtggggcgggaagcgttggcgtctccagccagaaacgcatatcaaggttgtactgggcggtaacggtgcaaaacggctccgtaccgacaaagcggtgtgtgatgccaagcgcgggcgccagatactggcggaaaatcttcaggtcgatttcggtataacagtgattaataacgctctgctctttaatgaaatagcaggggaacgtcgcacgagaaataatgtattcggagccgcggtgaacggttaagcgcgggatatcggtggtccctttaaggaccagatcgagtcggtcttcatagggaaagcgtgatgtatcttctttgaccaggaacagatgcagccagtcgcactgtgccgccgcctgttggatcagatagcgatggccgttcgtgaaaggattggcgttcatcacaatacagccaattttctttccctcatgacgcaatgtcgccagcgattccgcataccgtttcaaccgggtcgcgctattttccattaagaccattacgccagggacgctggctatcgtcgaaaagctgcactgtttaaacagcgcttcgtattccgttttggtataaataaaaagatgggtgcagtgccgctcccaggcgagattaatcaattccgtcgccagcgttaacgctaagccttcgccgcgtactgattcgctaatggccacgcatttaatgatatttccggcaataccgccgcaggcaataagacggtcatcacggctgacggtaataaacacttctacagtggtatcgacgcttaaatcattctctttgagaaagtgagcgatctccgccatttttttattttcagagcgttttacccgagtgaatacattattgccaaacatagtaagaaatatcctggtgatatgcttgttgccacttttctgtatatgttgcgctgtgttgcaacttgataactttttcttttcagtcagagtaggagtttttttatgacgagttatttatttttctctctgacgtatacatcgtaaggagtattttggtggtaaattttgatttatttcacaaagcgttagatggtttttaagtgttttatggttttaagttttttaattaatttaatcgccattccggcggtgggttttagttgtttaattgatttaatgtggggaatctgtaacgattggtttttatatgcttcaagatgctcaaaacatttttattacatttgcgataaatctgaagagaaatgcccataaggaaccttaatgtcctgtcagaaaaataaaaagctgtttcctttttttcggcaactcgcgtttccgttacgtatttttctgctcattctggtggtttctgttttcatcgtggcagcgttagcacaatatttgtctgccagtttcgaagattatctggcgtcccatgttcgtgatatggcgatgaatcaggcaaaaattattgcttctaacgacagcattatcgctgccgtaaaaaaccgggactataaacgcctggcgataattgcgaataaactgcagcgcgggacggattttgactatgtggtgataggcgatcgccactcgatccggctttaccatccgaatccggaaaaaatcggctatcccatgcagtttacgaaacccggcgcgctggaaagaggagaaagttatttcattaccggtaagggctcaatagggatggcgatgcgcgccaaaacgcctatctttgacaacgaaggcaacgtgatcggcgttgtttcaattggctatctggtcagtaaaatcgactcctggcggctggacttcttattaccgatggcgggggtttttgtcctgttgctggtggtattaatgctgctttcctggtttttcgccgcgcatatccgccgacaaatgctgggcatggagccgaaacagattgcgcgcgtggtacgccagcaggaggcgttatttagctcggtttatgaagggctgatcgccgttgatccggagggacatatcaccgcgattaaccgcaatgcgagaaaaatgttggggctgccgtcgccggggcgtcagtggctgggcaagctgatagcggaagtcgtcaatccggcagacttttttacctgccagatcgcagaaagacgccaggacgtgatggccaacttcaatggcctgagcgtcatcgccaatcgtgaggctatccgttccggcgaggagctgctgggcgctattattagttttcgcagcaaagatgaaatcgcgacgttgaacgcgcagctaacccagattaaacagtatgttgagagcctgcgcacgctacgccatgagcacctgaactggatgtcgactctgaacggcctgctgcaaatgaaagagtatgatcgggtcagagagatggtgcagggtgagtcgcaggcgcagcagcaacttattgatagtttacgcggcgccttcgccgatcgtcaggtggccggtttgctgtttggcaaagttcagcgcgcgcgtgaactggggctcaagatggtgattgttcccggcagccagctacatcaactgccggaggggctggatagcacggagttcgccgccatcgtcgggaatctgctggataacgcgtttgaggcgagtttacgtacacaggaaggcgacaagaccatcgaacttttcctgagcgacgagggcgacgaggtggtaatagaggtcgccgaccagggctgcggcgttcctgaagcgctgcgggaaaaaatttttgaacagggcgtaagtacccgaaccgacgaacccggtgagcatggtatcgggttatatctgattgcaagttatgtggggcgctgtggcggggtcattacgctggaagacaatgatccttgtggcaccttattttctttattccttccgaaagtgaaaaaaaacgatgacagaaccattaaccctattgatcgttgaggatgaaacgctgctggcggagatgcacgcagaatatatccgccatattcctagctttaaccagatatggctggcgggcaatctggcgcaggcgagaatgatgattgaccggttcaaacctggattaattctgttggataattatctgccggatgggaaggggattacgctgctgcatgaattaatgcagtcgcgctatcccggcggcgtcgtgtttacgaccgccgccagtgacatggagacggtagcggaagcggtacgcagcggcgcgtttgattatctggtcaaacctattgcttatgagcgtttggggcagacgctgacccgctatcaacagcgcagacgtatgctggcgagcgcggatagcgcaagccagaagcagatagatgaaatgttcaacgcctatgcgcgcggcgaaccgaaaggggatttgccgaccggtattgatgccttaacccttaatgcggtgatgaggctgtttgccgatccaaccgtacgccatacggctgaaacggtcgcgcaggccttaacgataagccgcaccacatcccgacgctacctggaatattgcgcgagtcagcatctgattgtcgcagagattattcatggcaaagtgggcaggccgcagcgtatttaccacggcggctaagcctggtttaagatgccggggcgatgttttccctcgccccggcttaccggctatcagccgccagtaacgctggaagaggcgcctggcaccataatttccgtggcgataatgacgatcaacagaccgacgataaccggaacggacgtgcgcttcaccacttcaaacggtgatattttagccatcccggcgacagcgaccacgacgccggagaccggcgaaatcgtgcgccccaggtttgaggcttgcagcattgggatggataaataggctgggttgataccggaggagtgcgccagtttagggatcatctcaacaaaggcgtaaaaaggcgcattgcctgaaccggtggtcatcgcggccagcatggttaaaatcactaagaccagcatcagaataatgctggcggagccaaaagaagtggcaatcgagatcagactttggataaagccaatggtgctcagcccctgggcgaaaacgcccgccgcgaccaacagcatcacaacgccggcaaacgcatccgccatgccgcgataagccacttccaggccggaaaacacattttgcgtgttgaaaccgcgcacgaattccagcacggcggccagcagcatacagatcaccagaatggtaataatgtgcaactgcggcccccatttaccgtcaaaaatcagtacgccgataatgggcgtgaacggcaaaagggcataaaacgccggggccgtggtggtaatctccgccacgtccagcatctcatgtgaaatgttctcttttttatccagatagcgttgccagaaaaagtgcgcaatcgccataccgataatggcggcgatggaaattggcagcgtagttttgaacgcgaaatcgattaacggcatctccgccgcttttgcggctaaaaccacatcgccagacgttggcgagaggatgatggcggccggagaggcgcaaatagccgccgccgcgccgcggctaatgccgacgttgaccatcaccgggaagagagtagccatgagcagtacgccaagccccgtcgcggaagagacggccagcgacatcaggcaggcgacaaaataggcggcaatcatcaacaggtagggcgagtttatgtactgtaaaggtttcgacgccagcttcacgaccatatcattcgcgccgatatgcgtcatataggcggcaaagccgcacagcatcatgatcatcatgccaagatcgccgccgcgactcataagcaaaattttgatgtattcaacaatatctgttgcggtatagccggtactggtttcgctggcaggtaataccttatgccccatcagcgcgctgataataagcagagccagaccgccgacaaataaaacgccagtggcggaatatcccttaatgatgtagcgcgctacacccacaataacgacgactccgataaggagctctataactgttagcattgtttcccctgtcttatcgacacccagagtaaaaataagaaccacaaaagtggtataaaaatgtaccgaataaaggatggcgccttactgattaaaatcacggcgcggttattttttcatgtcattgctaaagatgaaatatacttatacgaattttctgtagcactataagtattaatttattgttattttattgttttatttgttgtgctttgttttgtgttttttgtgaaagcttattaaggagcgcgtgacggttctgagtgctaaatcaaacgccgttaacccgatactctctcagattattctctgtttatagtttgttaagattttattcaggttaatgttgttattatcacagtcgaatttttgaacggtatgtatgttgcgatgatcatcagaaagtattttcttattattgctctccttttgatgccatggctggctattccttcagtctctgcggcggataaaggggggtttaacacgtttaccgataacgtcgcagaaacgtggcgacagcctgagcattatgatttgtatgtccccgccattacctggcatgcgcgctttgcctacgataaagagaaaacggatcgctataacgagcggccgtggggcgttggttttggtcagtcccgctgggacgacaaaggcaactggcatggcctctatatgatggcctttaaagattcatttaacaaatgggaacccataggcggttatggctgggaaaaaacctggcgaccgctggaagacgataattttcgccttggactgggctttaccgcaggcgttaccgcgcgcgacaactggaattatattcccatccctgtgctgttgcctttagcgtcgataggctatggtcccgctacctttcagatgacctacattccgggttcgtataacaacggaaacgtctatttcgcctggatgcgtttccagttttgatggggaagggtatgcttcagttgtgaattaaaaagtcttaaaaaacaataagtagatagagttagctaaaaattaacgcgatatttatcactttttcgcaaagttcgactggacaaaatgcatcacaattgttgtactggtatccgacacagcatttgtgtctatttttcatgtaaaggtaattttgatgtctaagattaaaggtaacgttaagtggtttaatgaatccaaaggattcggtttcattactccggaagatggcagcaaagacgtgtttgtacacttctctgcaatccagaccaatggttttaaaactctggctgaaggtcagcgcgtagagttcgaaatcactaacggtgccaaaggcccttccgctgcaaacgtaactgctctgtaagcatacgtccgacagcaagatttcaaaacccgccctttcggcgggttttttttgcgcttaacgcgccgctgcggcggaaaatagccagaatgccagcgccgtcatggcaaacgaacctaacaggttaatcagcacattcagcagcgcccagccaaagcgcccctcttgcagcaagaataccacttcggcagaaaaagtagaaaaggtcgtcaggccgccgcaaaagccggttgtgatgagcactttccacatcggatcgatatgtgtcatgcggttaaaccaggcgaaccccatgccgataataaacgcgccaagcaaatttgctgttagcgtaccgatgggaatcgcctgatgaagcggattaaaacgcatactgagcatccaccgggctacgctccccgttccaccgccgataaaaactgctaaaagaagctgtaacactgccgaatcctttatttaattgctatacaagaggagtgtaacgccgaacacgcataattggcgagtcctgacagaggtgtgggaggggatatgttcgttgcagccgggcagtttgtggtgagttctgtatgggaagagaatgcgcaagtttgcgtttcgttaatggctcaggcggcgggccgcggcgtatcgcttctggtgttgcctgaggggatattagcgcgagatgacatcgaccttgacctgccgattcgcgccgcgcagccgctggatggcgcgtttatgacgcggcttctggaagaaagcgctcataataatatgacgacgatattcactatccttgtcccgtcaacgcctggacgggcggttaatatgctggtggcgctacgggcgggtcacattgtcgcgcgttacgcgaagctgcatctctatgatgcgttttcgatgcaagaatcccaaagtattgatgccggaaccgttatcgcgcctgtgctggacgtggagggggttaaggtggggcttatgacctgttatgacctgcgctttccggacatggcgctagcgctggctttacagggggctgacgtattggcgctgccgacgggctgggttcgcggcccgttgaaagagcagcagtggtcgacgctgctggcggcgagagcgctggataccaccagctatatgattgcggccggggagtgtggtaatcgtaatattggtcaaagtcgtattatcgatccgttgggggtaacgatagccgcggcagccgatcgtccggcgctgatcgtcgcggaaatattcagagaacgaatagaccaggtgcgggagcaacttcctcttttgcagcaacgacgatttgcgccaccgcaattattatgatgtttttttacgcaaagcttgattcaccttgttacagattgctattgtgtgcgcgcgtcgaaagaccgttaatattctcaggttaatccggcgcgttacgcagcctgtttttagtgaagaaggtatctatgggtgagattagtattaccaaactgctggtggttgccgcactggttgttctgctgtttggtaccaagaagttacgtacgctgggcggagacctgggcacggcgattaaaggattcaagaaagcaatgaacgatgaagacgcgggcgttaagaaagacgtcgacggtagcgttcaggctgaaaaactctcgcacaaagagtaattgcgcgatgcgcttgctccgcagagtaaaaaaaccggcgagttgccggttttttttgcctgaaatgtaagcgtctattacacgatcatttcacttccatgcctttggcctggagatcagcatggtacgaagaacgtacaaaggggccacaggcggcatgggtaaagcccatcgccagggcttccgctttcatctcgtcaaactcttccgggctgacataacgctgtaccggcaggtgatggcggcttggctgtagatactgaccaagcgtcagcatggtaacgccgtgacggcgtaagtcgcgcataacctcaatgatttccgcattggtttcgcctaagcccaccatcagacccgattttgtcggaatttccgggtgcgcttctttgaagcgttccagtaatttcagcgaccagttgtaatcggcgcccggacgaacctggcggtaaatacgcggcacgttttccaggttgtggttaaacacatccggcggcgtcgcgttaaggatatccagcgcgcgatccatacgtccacggaagtctggcaccagggtctctatttttatctccgggcttttggcacggatggcggtgatgcagtcagcaaaatgctgggcgccgccgtcacgcagatcgtcacggtcgacagaggtgatgaccacatagcgtagcgccatgtcggcgatcgtttgcgccagtttctgcggctcttccgcatccggcgcaacggggcggccatgggcgacatcacagaacggacagcggcgagtgcaaatggccccaaggatcataaacgtagcggtaccgtggttgaaacattcagccaggtttgggcaagatgcttcctcgcagacagaatgcaggccatttttgcgcattgcggctttgatgccctggatacgggtagaatccgccggaagttttattttcatccattccggtttacgtagtagagcgtcgcgctctgtgaccacatttttaaccgggataagagccatcttatcggcatcgcggtattttacaccgcgttccatcacaatgggtttactcatagcgtgcgtgttccagttgcgaataacgaaggaaagcgtttcaattcaagggaaagttgtatttatcaactatttttgaatttgtgacacgcagtatatcattgataagggccataaagcagcctgacagcccggcaaaatgtaaaatagttgttgttttgtgctgtttgcccatatcttccgtgacctgaatgcaacatttttgtcagaacgcctcacggatgatatcaatgacgttctccagcaccggatcgcgcagactcagtttattgtaatgcagcgagaactcgacctgttcactattcaccggcgcgtagggaaggcgctcaagcggccagcagcggctaaataagtcgtagaagcgggtgggcatcagtcccagcagatcgctgctggcgatcagcgaggcaatggtaaaaatattgtagctgctaaaactgatttgctgatcgggaaatgtctcctgcagtcgctggcgcagcagggaaagatgttgtccctccagcatcagaaaggtgtgatccgcgctgttcagtctctcttcagtaatggcgttcgccagacacgggtgatgctggcggcagacaatctcaagcgtatcgctaaacaggacgtgatgctggatgctccggttgttatagctatgggtattgataatgagatcggtctgaaactgactaagctggctttcggcatcgtctaccggaatgttgcgcagcaaaagctgaggataacgcggcctgatggcctggtaaataatcggcatcactagcgcgccgaccgaaggcgtcgtgccaattgtaatggtgcgttgcttatcatagctgcccgtaagatccagggcgccaagaatagattccagcccctggctgatgtattcgtgcagatgcgtagcatacgtcgtgggcgttacgccctggcctttgcgaataaacagcggatcgggaaatatagtccgtaatttttgaatggactggctaatggctgacggcgtcaggttaagaattttcgctgcattgacgatccctttatggacatatacggcctcgaaaatcgtcaacagattgaggtcaatatttctcagtgttctgaaaatttgcggtttgtcctgtaggtgttgatcggccggttgtctttctgcctgattattatcactcacgctctggctccgaattcattcgtattatgaataatagatgaaatagtatattttgcatttatgggttggttttaaaattactcttatgaatgtatttttagtcatttcaataagataagtaacagcaaggccgggattttgttcacggaaaattcctcatcatgaggactgaagaggccatgccgcctggcggctacagcagggatataacgaaaatatagaaagcggggggagaagtaaagcattcaaatcatatatgattaatgacccataaatttcttgggccattatattttacgcattaagcagcaatatattcatacggtggattatttagcagagctaaaatattcgccagcaagcggggcgcaatattatccgtggtagcatcttccttccactgcgttattttggccatttccatgccggcataaccacacgggttgatacgcaggaaaggagaaagatccatgttaacgtttagcgctaaaccgtggaatgagcagccgcgacggatacgtaaacccagcgagcagattttcttttcacccacgtagacgcccggcgcatcggcgcgcggatgcgcctcaataccaatttcagccagcgtattcaccacggtctgttcaagtagggtgactaaatcacgcacgcccagtttacgtcgtttcaggttaagtaaaacgtacattacctgttggcccggaccatgataggtcacctgtcctccacgatcgctctgcacaacgggaatatcgccaggcatcaatatatgttccgctttaccggcctggccctgggtaaacaccgggtaatgctcaaccaaccagatttcatcatggctgttttcatcgcgcatatcggtaaagttatgcatggcctgagagatagcttcatagggctgaaggccgagctggcggacaaggattttatcctgatacaaaacggcatctccgtagagaatgaaaaaagagaggaaagtatatcacagcgggggaggcggggagttacccggataagaccgggtaaccgtctggatgtattacaataccattcgcacgatatcaatattgcccagttcttcgtacagcgtttcaacctgttcaatatgggtggcattaatggtgatagagaccgagtggtagttgcctttgctgctcggttttaccgtcggagagtaatcaccaggcgcatggcgctgtaccacttcaaccacctgatcaaccagctcaggtaacgcctgccccattactttgtaagtaaatggcgtagggaattcaagcagttcgttaagtttggttttcatgtcagctccggcattacgtaaaaaaaataacaactcccgccacagggcgggagttttactgatgcatagtatatggggacgaaaatcacactttcaagcgttcaatttttatccaaaccagtgatggaacattaatttaatgtaatcaatgattttaccgaagaagttcccttccgggatctcttgcagtacgaccagcggacgctgctcgatggttttaccgtccagctggaagttgatggtgccgaccacctggtttttctgcagcggcgcgtgcagttctgcggtattcagtacatagctcgctttcaaatctttcatgcgaccgcgagggatcgtcaggtaaacgtctttatcgacgcccagcgaggcgcgatcggtattaccaaaccaggcgggttcagaggcgaactctttaccagccttcagcggattaacggtttcaaagaaacggaagccccacgtcagcagttttttgctttctgtttcacggcctttataggtccgtccgcccatcacggcggaaatcaatcgcatctggccttcggttgcggaagcgaccagattatagcccgctttgctggtatggccggttttgatgccgtccacattcaggctgttatcccacagcagaccgttacggtttaactggcgaatgccgttaaaggtgaactctttttctttataaacggcatattcgttcggcacatcgcgaattaacgcctgaccaatcagcgccatatcgcgagctgaactgtattgtccgtcggcgtccaggccgtgtacggtctggaagtgggtatttttcagccccaacgcgttcacatagctgttcatcagcccgacgaaagcatcctggctaccggcggcgaaatcagccatcgccacacaggcgtcattgccggattgcagattgatgccgcgtatcaactgagagaccggtacctgcattcccggcttgaggaacatcagcgaggagcctttaaataccggattgccggtggcccaggcgtcattaccgacggtaaccaggtcggtttctttaaatttacccgctttcattgcctgtccgatgacgtaactggtcatcatcttcgtcagactagccgggtcgcgacgttcgtcggcgttttgttccgccagaactttgccggagttgtagtcgatcaggatgtaggattccgcatcgatctgcggaacgcccgggatcatagttttgatattcaggtcatcggcatgtgcggttgagataaacgcggcacaaagcgccgtggtgagcgccatgcgctgcataaaacgagcggaaaaagtggtcttcatggtctgaactacgacgtccgtgatgaaattaaaaaaagagccctactatagcaaaagcataactggcaggcatctgactttccgcgtgactttgttaatgtcatttacagaaattgacagtacagatacctgcgatcggttactgcgcgctggcgataaaggactgtaattgtgcttctgtttgcaaacgttgctgtaacgcgctggcttcggctttactggcaaaaggccccagttgaatacgccagaccgcgccgttttgtattacgcgtcctggtacgctgaactgctggcttaaacgctgttggtattgctgcgcacgcgtttgatcgctgacggcgccgacctggacgacgaaacgaccgctcgccgcggcggctggagccgccaccggcgcggaaaccggcgctggctgtggcgccggcgtcggttcattactctccagcacgccaggcgccagcgtagtcggcgcgccgaggaagccgctgctgctcaccggcgcaccggtggtatcgtcacttttcaacgtggaattactgaccggaagaacgtcgccttgcggttgtgcaggtgctgaagaggcgcttcccattccgccgcttaaatcagggcgcgggggcagagcgtaggtctgtttcgccaccgtcgtacaggccatccccgggccggagagcgaaccatccggcgccacgataatggggtcaatccgtactttagtattattcgaggtattcagacgatccgccgctgcgcgggacagggagatgacccgatcggtgccataggggccgcgatcgttaatacgcacgacgatcatgcgaccgttggccaggttggtgattcgcgcatagctggggataggcagtgtcggatgggcggcggtaagctgcatcggatcgaacatctccccggaggcggttaaattactgccgggttccgcatcataaatagcggccaggccagcctggctaaagcgggacgggtcctgaacgattttataacttttaccgtcacgctgataatcctggtttgcggtcggattcagaggttcataacgcggttccgctccgctgatttccacagtcggaccattacataccgcaggttgcggcgcgacggtggtttgctgctgaccgccgtcattagtacatgccgcgagtagtactatccctgccgcgacgcagattacaggcaactgcttacgcattgcgcaccccttatacgcttttcgacaacatttttctgtgggtgtggatcgacatcacaatcccgaacccggccatcagcacaatcagtgcggagcccccgtagctgaccaggggtaaaggtactccaaccacaggcagaataccgctcaccataccaatatttacgaagacataaacgaataatattaacattaatccgccagccatcacgcgaccaaatgtagtttgcgctctggcggcaatccacaagccgcgcattattagcaaaatatagagcgcgagcagaatcaggatgcccaccagaccgagctcttccgccagtaccgcgaagataaagtcggtatggcgttcgggtaaaaactccagctgcgactgggtgccgtggagccagcctttaccgcgcaggccgcctgagccaatggcgattttagactgaataatatgatagcccgcgcccagcggatcggtctccggatcaaggagcatcatgacgcgctggcgttggtaatcgtgcatcaggaaaaaccacaaaataggaataaatgcagcgatcaatacaatggcgaccccaattaagcgccagctcagaccagacaaaaataggacaaagagaccggaaagggcgaccagaatagacgtccccaggtccggctgggcggcgaccagcagggtaggcataaagattaataccagggcgatggcggtatttttcagcgagggcgggcagacgtcgcggttaataaagcgggcgaccatcagcggcacggcgattttggctatttccgaaggctgaaagcgaacgattcccagatcgagccagcgctgcgcgcctttggatattgcgccgaaggcatcaacggcgaccagcaaaatgatacaaatgatatagagatagggcgcccagccttcatacacgcgcggcgggatctgcgccatcaccaccatgaccaccagccccatcgcaatctgaccgattttacgctccatcatgccgatgtcctggccgctggcgctccagatgaccaacgcgctataaaccagtaacgccagcagaatgagtagcatcgtgggatcgatatgaattttatcccagaaggtttttttgttcggattatccgtcatgattattggtcctccgccgctgcaaccaccgggttttccgcaggcaaatgggtgttgttgtcgcccagcatgatgtgatcaaggatttggcgcatgatcgtgcctactgccgggcctgcgccgccgttttcaaggatgatcgcgacggcgacctgaggattgttatacggcgcaaaggcggtcatcaatttatggtcgcgcaggcgctcggcgattttatgcgcattgtacgtttcgttggccttcaggccaaagacctgcgcggtgcccgacttcgccgcgattttatagggcgcgctggcaaaatatttatgcgccgtgccgttagggcggttggcgacgccatacatgccatctttcgcaatttcccagtagccggagtgaatatcgcccaccggcggctcatgcggctgtacccacggcacctgtttaccgttttccgcggtgctcattaacaggtgcgggactttaactacaccgtcgttaataaggatcattagcgccttactcatctgaatcggcgtcgctgtccagtaaccctggccgatgcccaccggaatcgtatcgccctgataccacggttttttaaagcgtttctgtttccactcgcgggtcggcatattaccagagcgctcttctgcgagatcaattccggtgtagtgaccatagccgaacttacccatccattctgacaggcgatcgatccccatatcataggcaacctgatagaagaaggtatccgccgactcttcaagggatttggtgatattcagatgcccgtggccccattttttccagtcgcggtagcgtttctcagaccccggcaactgccaccagccagggtcgaaaagactggtgttacgggtgatgacgccagcgcttaacgccgatacggcgacgtaaggcttaacggtagaagcaggtgggtagacaccctgagtcgcgcggttcactaatggcgtgttcgggtcgttaagcagcccggaataatctttgctggagatgccatccacgaaaaggttagggtcgtaacttggcatggagaccagcgatagcacgccgccggtacgtggatcggtgacaatcaccgccgcgcgactgcctgccagcagcgtttcaatatactgctggagcttgagatccagcgtcaggtagatatcgtgtccggcctgcggcggcacctctttgagttggcgaataacgcgaccgcggttgttgacttcaacctcttcataaccggtttgcccatgcagaatatcttcatagtagcgctcaatgcccagcttgccgatgtcatgggtggcggcgtagttcgccagtttgttttctctgtcgagacgctcgacgtctttatcattgattttcgatacgtagccgataacgtgggtcagcgccgatccgtatggataatagcggcgtttatagcctttgacttcgacgcccggaaaacggtactggttgacagcaaagcgcgcgacctgaacttccgtcaggtttgttttcaccggaatagaagtaaagcgatgggatcgggcgcgctcttttttaaaggcggcgatatcgtcgtcgtttaaatcgaccacactgcgtagcgcatccagcgtttgctgaacgttatccaccttttccggcatcatttcaatctgatagatagtgcggttcagcgcaaggggaatgccgttacggtcgtagattatcccgcggcttggcgcaattggcaccagcttgatacggttttcgttcgagcgggtctggtaatcggtaaaacgaaggatttgcagattatacaaattggcgatcagtacgccggtcagcagcaaaatacccaaaaaggcgaccagcgcccgacgcacaaacagtgcggactcagccgtatagtcacgaaaagaattttgtcgtttcatccgctgcttaatcttctcaagacttcacgatcactcacggtgataagggtggttggttgtgatgctccacgcccggtacaaactctccgcaaccagaacccgaaccagcgggtgagggagcgttaacgccgagagcgaccagctctgttccgctgccgctttgcaggcgggagataatccttccgggccgccaatcagcaaactgacgtcgcgcccgtcctgtttccagcgctccagctcattggctaactgcggcgtatcccacggcttgcctggaatatccagggtaacaatgcgattcttaccggcggcggccagcatctgctcgccctctttgtcgagaatgcgtttgatatccgcgttcttgccgcgtttgcccgcagggatttcgatcagctcaaagggcatatctttcggaaaacgacgcagatattccgtaaatcccgtttgaacccagtcgggcatcttcgtgccgacagcgacaagttgcagcttcacgcattaactccagagtttttccagttcatacaggcggcgactttcttcctgcatgacatgcacaatcacatcgcccagatcgacgacaatccagtcagccgcattttcgccttcgacgcccaatggcagcataccggccgcgcgcgacgactgcaccacgtggtcggcaatagacataacgtgacggctggaggtgccggtacaaataatcatacagtcggtgatactggatttaccctgaacatctaaggcgatgatgtcctgacctttcaggtcatcaattttgtcgataacaaaatcctggagtgctttaccctgcaagttttccccctgggtgaataattgcgttataacgatagaaaaaaggccaacaggctggaccggtaaggcgttgcgagttaacgctaaccttccggcgggacgccgtgtagtatacctgaatcagcggcgataccgggacttatgtcgccggatcggcgtttaaaaccagattatcatcccatcccacgtcacagaaagcatcgccatttttgtaaaacaatttctgcaaagctctgcaaggtgaaaaaagcctggctgcggagaataacagcctgtcgggggctgtcaatgggcgaaaccgctgcggcgagaaaaaacggaaaattcatcactcaggccgccagacggcacgactatttaatactttcagggtggcgaacccttcgcatatgtcgattgcgctccagcatccctgttctacccggaaatgccatagcgaggcggcgggcattgtgagcagacgggcaatcaacaggctgagtacgccctgatggctgacgatcagcaggttctggcaatcgctaaacgcgtcgagtcgcgagataaagcgctctacgcgccgggtaaaagcctgaaaaccctcgccattggtcggaaccgcattctgccagtccgtacaccaggcggcatagctttcggcatcttcatgggtgaggtcgcggtgatggcgcatttcccagtcgccaaagtacatctcattaagctcaggtaagatgtgttgcggcacatcccggccctccagtacgagccgggcggtatggcgcgcgcgctccagctcgctgcataacacccggtcaaatggcgcgtggcgcaataaagtatgtagcgttttcgcctggccaatccctttttccgttaacggcgtgggagcatgtccgctatacaacccggcgacattggcctcggtttcgccatgacgcaccagccacaatcgcatggtattcctcatgaggttaaatgcgcaaaacatgataatgcccctgattgcgcaacgtttttttcactaaaatagcgttttttggctggaggcataatggcgttattcaacagcgcgcatggcggtaatattcgggaagccgcgacggtgttgggcatctcgcctgaccagttactggattttagcgcaaacattaatccgctgggtatgcctgtcagcgtgaaacgcgcgcttatcgacaatctggactgcattgagcgctacccggacgccgattattttcatttgcaccaggcgctggcgcgtcatcatcaggtgccggcatcgtggatactggcgggaaatggcgagacggagtcaatctttaccgtggcgagcggtcttaaaccgcgtcgtgcaatgattgtcacgccaggtttcgcggagtatggccgggcgctggcgcaaagtggctgtgaaattcgtcgctggtctctacgcgaagcggatggctggcagcttaccgatgccattcttgaggcgttgacgcccgatctggactgcctgtttctgtgtacgcctaataatcctaccggcctgctgccggagcggccgttattacaggccattgccgatcgctgcaaatcgctgaacattaacctgatcctggatgaagcgtttatcgattttattccgcatgagacgggctttattcctgctcttaaagataatccgcatatctgggtgctgcgttcgctgaccaaattttatgccattcccggcctgcggttgggatatctcgtcaatagcgatgacgcggcgatggcgcggatgcgtcgccaacaaatgccgtggtcggttaacgcgctggcggcgcttgccggtgaggtagcgttacaggatagcgcctggcaacaggcgacctggcattggttacgggaggagggcgcccggttttatcaggcgctttgtcagctccccctgctgacggtttatcccgggcgggcaaactatctgttgttacgctgtgagcgagaggatattgatctgcagcgacggttgctgacgcagcggattttaatccgtagctgcgctaactacccggggctggacagccgctattatcgtgtggcgatacgcagcgctgcgcaaaacgagcgtctgctggcggcgctgcgcaatgtgcttaccggtatagcccctgctgattgatgtagttcagcacgttttccggcaacagatcgtcgcaggattcgcctttttccagccgttcgcggatgagggttgcggagatattaagccagggcgtttccgccaggtaaattttaccggctggcaactggtgcagatcgtccggcgtatgggtcagatgctgttccagccactgctggtgttgcgcctgcgtcatttcaagggggtagccgggacgacgacaaacgatcaggtgagtgttatcaaggatggtgtcgtaatcatgccaggtggggaagttaagcagcgagtcctggccgataataaacgccagcggcgcttcggggccctgttcttcgcgccatgctttcagcgtttgcgcagtgtaagagggcgcgtttcgctgtagctcgcgttcatccagcgtaaaaagcggcttatcggcgatagccagctccagcatatatttacgctgcgcgctggaggcttccggctgggggcgatgcggcggcacattgttaggcataataatcacccgcgataagccgatcagattcgccagcgtttcaacaggtttaagatgtccataatgcaccggatcaaaggtgccgccgaataaagcctgtaacgatttcatatcacccatcaataaatacgtctgccagcgccttatggcagagcaggagcgacagcccttcaagatctgcccataccgactgaccataatcctgtttgagcgtaatttctgtacgcgtcagtaactgcacggcctggcgaagctgcgcaggatggagacgctgcaacgcgtcgccgatcatggggcgacggttttgccagacccggtgtttatcaaacagcgcgcgtaacggcgtatgcgcggactgacgtttgagatttaccagtagcagcagctctcgctggagggtgcgcagcagaataaccggttcgctgccttcaaggcgtagctgttgcagaatgtgcagcgcgcgtttgcttttccccatcagtaacgcatccacccagtggaaaggggtaaagtgggcggcgtcattgacggcctgctccacgcgaggaagcgttaacttaccgtcaggccaaagcagcgacagtcgttccagcgcctgcgccagcgccaacagattgccctcatagcaatagcacagcagttggttcgcggcgtcatccagttgcaaattctgtgctttcgctctggcggccacccagcggggaagctgcgcctgctccggcgtctgacaactgacctgaacgctacggtctgccagcgcggtataccaggctgcgttttcctgcgctttggtgagcttgtttccgcgtactattaataacaggtcgtcatgcagcagctcgctcagggtggcgagttgctcattcattgccgcgttaggcccgttttccggcagttgcagcaccagcgtttgacggctggcgaacagactcatcgcctggcagagtgagaaaagcgatccccagtcggtactgggatcgagagtaaaagcgtggtgctcttcgaagccttgcgacgcagccgccagacgaatagcgtcctgactttcctgcagcagcagcggatcgttgcccaatagcagatatgccgcacgcagcccttcattgagctgcgcgcggagttgttcaggatacaacctgatcattagttactcagcgtagtggagacgcgtgctggcgtagaggcgggcgccgccgtctcattgtcggcggtagcctcctctttcgtcgcctgaatatccgccgcgcggacgctggtcagcttacgaatcagctgttcagcggctttgtcgtacatctcctgaacgatcatggcctgctcgttatccttcgccaacgccatctgcgggttatcgaagaacgaacggtacactttcgtgctgataggatagatgtcatggcccggaatcaataccgaggcattgacggtcatcaccatctgatattccgccgtctggccgtcctggaacactgacgccgtatcctgcaaaatagtcaccgttccaagccgcagagacggaacgtctttgcgcgttgtgtctttatcaagcaggtttacgttattcagccgtaactgattacgtaccgcacgacttagcggaccgttcggatcgccggaatcgaggatcatcgttttcattgaagccggaacctgcgtagtgctacgcagatgccagccgcatccggcggtgaccagcaccgccagagataacaacagtgttaccagatatcgcacgcttcctcccgcgcttagccaacaaccagattgaggagtttacccggaacgtaaatcactttacgcacggtaacgccatcaagatattttgccaccagatgttcctggcctgcacgttcacgcacctgttcttcggtagcatccaccggtacggtgattttcccgcgaactttaccgttaacctgcacgacaaccagcgtggtgttttccaccattgcctgctcgtcggctaccggccacggcgcgttgtcgatatcaccttcgccgcccagctcctgccacaaggtaaagcagacgtgcggcgtgaacgggttaagcatacgcacgacggcctgcagcgcttcctgaagcagtgcgcggtcttgttcgccttcctgcggggctttcgccagtttgttcatcaactccatgatcgccgcaatggcggtgttgaacgtctgacggcggccgatatcatcggtcactttggcaatggttttatgcacatcgcgacgcagcgctttttgatcttcgctcagcgcatcgacgttcagcgccgcgacaggacctttagcggtgtgttcgtaaaccagcttccagacgcgtttaataaagcggtttgcgccttctacgccggactcctgccattccagagtcatatccgccggagaagcgaacatcataaacaggcgtaccgtgtccgcgccataacgttcaaccattacctgcgggtcgataccgttatttttcgacttggacattttactcatgccagtgtagaccagctcatgacccgctgcgtcttttgctttgacaatgcggcctttttcatcgcgctcgacgatagcgtcaactggcgaaacccagttacgttcgccgttctcgccgacataatagaacgcatccgccagtaccatgccctggcacagcaactgtttagccggctcgtcagaggtgaccatgcccgcatcgcgcatcagcttatggaagaagcggaagtagagcaggtgcatgatggcatgttcaataccgccgatgtagatgtcgaccggcagccagtagtttgccgctttcgaatccagcattccttcctgatactgcgggcaggtgtaacgcgcgtagtaccatgacgattccataaaggtgtcgaaggtgtcggtttcacgcagcgccggcataccgttaacggtggttttcgcccactcaggatcggctttaatcgggctggtgatgccgtccatgacgacatcttccggcagaataaccggcagttgatcttccggcgtcggcagcacggtgccgtcttccagggtgaccatcgggatcggcgcgccccagtaacgctgacgggaaacgccccagtcacgcagacgatagttcactttacgttcgccgacgcctttttccgccagtttatcggcaatggcgttaaacgccgcttcaaaggccaggccgtcgaactcgccggagttaaacagcacgcctttttcggtcagcgcctgttcggaaagatccggctcggaaccgtcggcggccagaatcaccggcttgatggtcaaaccgtatttggaggcaaattcgtagtcgcgctgatcgtgacccggaacggccatcaccgcgccagtgccgtactccatcaggacaaagtttgccgcccagaccgggatctcttcgccagttaacggatgaatcgctttatagccggtgtcgacgccttttttctccatggtcgccatttcggcttcggccactttggtgttacggcattcgtcgatgaacgccgccagttcggcgttgttcgccgccgctttttgcgccagcggatgaccggcggccaccgccaggtaagtggcgcccataaaggtatctggacgggtggtatagacggtcagggtgttatcgtaacccttcacatcgaaggtgatttccacgccttcagagcggccaatccagttgcgctgcatcgtttttacggtatcaggccagtggtccagcttatccagatcgcgcaacagctcgtctgcgtaagcggtgattttgataaaccactgtgggatctctttacgctcaactttggtgtcgcagcgccagcagcagccgtcgatcacctgttcgttggcgagaacggtctgatcgttcgggcaccagttaacggcagaagtcttcttgtacaccaggccttttttatacagctcggtgaagaacttctgttcccaacggtagtattccggggtgcaggtcgcgatttcacggctccagtcatagccaaaacccagcgtttttagctggtttttcatatacgcgatgttgtcgtacgtccacggcgccggcgcggtgttgttcttcaccgccgcgccttccgccggcaggccgaaggcgtcccagccgattggctgcagcacgtttttgcccagcatacgctggtagcgggcaaccacgtcgccgatggtgtagttacgtacgtggcccatgtgtagtcggccagaaggatagggaagcatcgacaggcagtaatacttctctttgctctcgtcttcggtcacttcaaatgtgcgcttctcatcccagtgaagctgtactttggattctatctcttccgggcggtattgctcttgcatggcagccagtagtcctgttttcgatacagctacaaatgtagctttagaggtggtgtttagatccgcatagcatagcccaaacacgcacgtcaaaacagggggtagaacatttgtcgcgccaggcgtccgtgaggaggtgacgcaaaatgcgacacgactgaggcaaattaccgcagttcctgtcaccgccagatcggcccataaaaataaagtcatataaaccatgtagttaaaaaatggcacgccttttgattagggaagacaggactaaagcaaaggagttaatcgtgaaaaaaaatgcagtggtgattcaccctcaggattgcgtcgcgacggctattacggcgctcaaggctggcgaaaccgccacaatgttcattggcgaacgcgagataagcgttgtgttacatcaggatgtgccatttggccacaaattcgccatctgcgatgtgccttttcatggcgaagtttataaatatggcgaatccattggccgcgccactcaggaaataaaaagtggcgactatgtgcacgtccacaatgtggaaagtgaacgcggacgtggtgactggaaataatataaaacaagggaaaatgattatgagcaatgagacttttttgggtttccgccgccctgacggccgttttggcatccgtaattatgtactgattttacctaccagcgtttgtgcgaataaagtcgcccaggatattgcccggcaggtaaaaggcgcgacatgggtgaataacgattttggctgctgccaggtggcaggagatgcgcgtctgacggaaaagacattgattaatgtggcgaataatcccaacgtcggcgctattgtggttgtgggcttaggctgtgaaggcgcggagccgctgcgcatcgcagaagagattaccgcatttggcaaaccgacctcctgcattaccattcaggaagagggcggcacgcttaaatgtcaggctcgggggatttcgctggcccgcgattatgcgcaacaactctccatgcaaaaaccgcagcaagcaccggttagcgagctgctgctggcgatggagtgcggcgggtcagatacgacatcggggctggcgtctaacccttcctgcggggtcgcctcggataagctgatacgctgcggcggaagctcaattctttctgaaacgacggaatttattggcgccgagcatgtgatggcgaaacgcgcggtgacgccggaggttggtcaacagcttattgatttagtggtcggctgcgaggcgcgagcaaaagcgctgggcgaggatattcgcgggggacagccgacgccgggcaatattaaaggcgggttgactaccattgaagaaaaatcgttaggctgtatgcataaagcgggtcatgcgccgttacagggcgtactggaatatgccgatagcccaacgcatccgggcctgtggattatggataccccggggcaggatattgaatctatttccggcatggtggcggggggagcgcagatcgttatttttactaccggtcgcggaacgcctgccggtaacccaatagcgccggtaataaaaattacgggtaataaagcaacgtgggaaatgatgcaggacaatattgatattgatgtgtccgccattatgtctggcgaggcttctattacgcaaatgggcgaggaaatttatcaggaaattttacgcgtcgcgaatgggaaaacgactaaatcagaagatttaggtcataacgaattctctatttataagatcgcgccgacgttctgataccaaatcgggcagcacaagctgtccggttatctcctgggaataagctatgaaaattaaaaaaacactggaacgttttcctggtggtatgatggttgtaccgctaatcatcggcgcattgtttaaaacttttgcgccggaggcgctggaaataggcggttttgtcacttctatttcgcatggcgcaatggcgattttaggcatgtttttagtctgtatgggcgcggatatccagtttaaagccgcgccgaaagcgctgaaaaaaggcgctgcgatcacctttgcgaaatttgccagcggcgtgattattggcattctggtcggaaaattttgcggcccggatgggttattaggtctgtcggctttagcgattatttcggcgatgaccaactcgaacagtgggttatatgccgcgttggtgggggagtacggcgatgaaaccgacggcggcgcgattgcggtaatatcgttgaacgatggtccctttttcaccatgctggcgttaggatcggcaggcatggtgtcgataccctttatgaatctggtggcggttattattcccattatcattggcatgattttgggtaatctggatgaggacatgcgcaagtttcttaaacagggcagcgtggtaacgattcccttttttgcctttgggttaggatacggtattgatttcgcaagacttatcacggcaggttcttcaggcattttactgggactcatgacggtggcgattggcggattttttaatattttcgccgatcgtctgacgggaggcagcggcgtggcaggcgcggcggtctccaccacctctggcaacgccgtcgcgacgccagcggcaatcgcgctgctcgatccgcattttaccgacctggcgtcgacggcggcggcgcaggtggcggcctcgacgattattaccgctctgtgcgcccccttcctgaccgtatggataaaaaaacgctacgatcgtaaactgaacccagccgccgcaggcggttagcgtttcggcggaaaataaatcacgacgggcggtctcgcccgttcataaaccaacaggatggtgagtgatgaataagacgaaagatatagccgcatctcctctctgttttgtctctccttaccctcaactggcaaaggctgccgaggcgctggtcgcgcagttggattacgccgtcactattcatcaaacgacgcttaatcgtatcctggatgagctacctttattagagtcccgtgggcaccaggtactgattagtcgtggcggatgtgcggaaatattaaaaaagcacagtaaattaccggtagtcgaaattaaaatgtccggctacgacattcttgatgcgcttatcccttttaaaggacaaaaaggcactgtcggtattgtcggcttttccagtgtgatcaaaggatgcgcgcgcgtagcggaacagttaaatattaactataaaatttttaccttacagggaaatgataaagaaacgatttcttgcctgaagcggcaattagcgtccacgccattagattgcattgttggcgataccgtttgtcaggattatttttcaccgctgggctcgcaattccgtttacttgattccagccccgcctcaataaccgaagctctggaagaagcccgctcattatatctggcttttcgcagccaattactcgagcgtcatcatctgcagctgattctcgatcagtttgataaagctgttatcacgcttgatgataccggcgcgttactgcattacaataaatatgcgagccaactttttaaaattaacgcctccggtgagatttatgacgcatctttcctgaaacaggtattgcaccaggagcggcatacattacgtgagggaaaaaccgtcagcgcgaaagtcgtcgatacgccgcaaggcgcgatggtagttaatctgtatccggtatttgcggccagacagttaagccgggtagtgttgacgatgcaaaccgtctccagtttacagggggcggaacatcatgttcgccgccaggaactgtctcgccgcggcttgagcgcccgctatcatttcgacgatctgcttaccgaaaacccggaaatgctgcgtcgtctggcgatcattaaaaattatgccggtacggacgcgactatcttaattaatggcgaaagcgggacgggaaaagaggtgctggcgcaaagtattcataatgccagccaacgcgtcaacggcccgtttgtcgccattaactgcggcgcgatggcccctcagattctggagagcgaactctttggctatgtcgccggcgcatttaccggcgcgtcgccgaaaggcaaaataggcctgtttgaattagcgcaccacggtaccatttttctggatgagattagcgagctggataaaccgctacagacgcgcttattacgggtattgcaggagcggcagattatgcggctgggctcagaccagatgatacctgttgatattcgcgtgattgcggcgaccaatcagacgttaacgaagctcattgcggacgggacatttcgcgaagatctttactatcggcttaacgtattaaaagtgaccaccatcccgctacgcaaacgtccggaggatatcaaagccatcggcctgtcgctgcttactagtttcagccagcattataaacgcccggcactaacgttaaccccggcgctgtggcaagagcttcagcgcttcgcctggcccggaaacgtcaggcagttaagcaatattatcgaacggctggtactctctattgatcactccccggcaacgctggatgagggtcgcctcttgctggacgatctggaagaggggagccgacgcgagccaactacctgccacgactgccagatgctggctggcgattataaaacgattcgcctgcgtattttgagaaaattattagaggcggaaagggataataaatcgttagtggcgaaacggttaaatgtcgatcgtacctcgctgacgcgctggatacgcgagtcggcctgacaagaatttacagactctgtgggcagccttgcaaagcgtaacgcaaataacgtctattattataggcagttaacgatccaagaggtgaagtgatgaacaaggttgctcaatattaccgtgaactggtggcctcattaagcgagcgtttacgcaatggcgagcgcgacattgatgcgctggtggagcaggcgcgccagcgcgtgatgcaaacaggggagttaacgcggaccgaggtggacgaactgacgcgcgctgtcagacgcgatctggaagagttcgccatgagctacgaagagagccaggacgatagcgtcttcttacgggtgattaaagagagtctctggcaggaattggcggacattaccgacaaaacccagctggaatggcgtgaagtcttccaggatttgaatcaccacggcgtgtatcacagtggcgaagtggtgggattggggaatctggtgtgcgagaaatgccactatcatctggcggtttacacgccggatgtgttgccgctctgcccgaagtgtggccacgatcagttccagcgcaggccgtttgagccgtaaggttcattatcgtgagcggacggttgccgtccgccatgttaagcgtgcagttgggcttccagtttgcggatctcttcatcgacgttccatttgcccgtgggctgtgcttttttgaaccagtagagcgcttgttgtaggtcttgtgcggtaccgtgtccatctctgtacatgcatccgaggttgtaccagcccgatgaattgttacattctgctgatttgtggaaccattccagtgctagcgaataattttgctcgacgccatgaccgcatttgtacatccagccgatactgttataggcatcatcgtcaccctggtctgccgcttttcgaaaccagtatattgcctgctggtaatcttgtttgataccttttccgatgtaataacaatagcccatctgatattgcgagtagctgctctcttgtagcgcgctcttcttgtaccaaagggcggcaagggataaatttttccgacatcctttcccattgccatacatatacgccagtctttcctggctggcgcaatggccttgtaatgctgcctgtttaaaccagtagagtgcctgtgtatcattttgctctacgccagttcctgaatgatacattctcccgagattatattgcgcaaggttgtggctctgttctgctcctttgcgataccaggcaacggcctgggcataatctggcgccatcccggtttctccttcctgaacccagcctaatgtgttgaaagcgtggcggtgtccttgctgtgcggctttttctgaccagaataaagccagcgtattatctttcatgtcggtaggcgtgtctttgtatcgtaagccgagccaatattgtgcctcgcagtgtccttgttcagctgcctgctgcaaccaataaaaagagagcttatcctcttcgctgccatctatacgttcgtcattatataaacggcctaatatatattgagcttcactatttcctgactgcgccagttcggttaattgtgctaaagatacgttgtcgcagggatgactggttatggaatgattcattttttaatttatcccgccattgttttttagattaataatatattgcgatttggctttgttgtactctattttagttttcaattgcgtttttatttgtggtgtgaatatattttggcgatttattatggataaagaatcacaatatttactctttgcactttcctcgccgatggaagtattgaacgaggactgtttaccttcacattcgtcaccgaaaatgtatttaggtgtaaaacgtttcgatcttgaatcgtcgtggggtattgaaaatcgcgatgaactgcttcagaccatttcccgcaggacggatgacggtcatgccacacaactggaatggctatatcgccgctggtttaggtatgcgccgcaggagtggcaggagtataccgacgcgctggacgagggagatcgcatttatgcccgattcgtcgctgataccgccgtgtgttgcggcgaaggtggtattcgcagttgggattatgtgcggatgggatttctctgccgcatgggcgtgctcaatgaatggctgacggaagaggagagcctgtggctgcagtcgcggatacagcttcgcgcgctcagctattattccggctggttgccgtacttcagcgcttattacaccgggcgtttgtactggcagttacggaatggcgataacctaccgctgctacgcgagacattcgcccgtaaggagtttgatgacgcggggcgacgtatgatgaataaactgatcgccgggaaggacagtttttacgccacgctgccgtggcgctacctgccccattaccctgaatgcccggacacgcttcaggaggtgagcgatctatgaaaacctgttggcaagtccttggcattgaggccaccacggataccgacgccattcgtcaggcttatctggcgctgctgccgtcatttcatccggaaaccgatccgcagggttttaagcaattgcgagaagcctatgagaatgcattgcaggggacaacatcgcccgccattacggtggttgatgaggatcccgataccccgtgggtgaattatctcagggagatattcggtgatttgctggcggatggcgaacggcgctttcagccgcaggcatggcaggagtttatccaacagatcaataaattatcgatttcacaggtcgaaaaatcgcgctggtggctgtgcgctatcgcgatgaagacctttcctatttcgtactcgtgtctgaaactgctgtcagatcgcctggcctgggaacaggggagtgataatcgagatgtcgatgccgaggaggtggaggatcttttgtttgaaatccgccgtggcgacctgtttgattattcgctattgctgcatttgccagtggcggtacaaaaccagaccattgctttttatgatgccctggacaacacctttttcgagcatcctctctatttcgcccaacttatggcccagcacggcccgtggattatcccggacaatctacgctttcaacgacgtctgttacgctggttcagcaccttgcactggggtattgcggagctgctgcctgtcgccctggcatggcaggaagccgaacccgataacgcaacgccgggttattactacttagcccagcgcgtattttgcggtgaaggcgatagcctgctgccagaactttacgcgcagtggtgggcgcatccttctacccagcttgacgatctgttgctgcgctggtgccgtcagcatcgaccggactttttcccgctgctggtgatggcggttgaggggcgtgagcaggtggatattaacgctgaacagctgctgtatattcccggctcaagcgctcgttcctgcttgctgtgggccgaggcgctgcacagcggcgcattatcgccgctaagcgaaagttttattgcgcggcgtttgaattatggcgcgccagcggtgagtgaggcgcatagccagcatccatactggctgttgtatcaggtggcggatagcctggcgtgcgccgaggagccgtcagcggcattgttacagagtctggtaacgaagcttgatgcgccggatatctgcccgttggaagcgctggttattcgcgggttgctggggcgggctgcggctgtcgccacaccgtgtgaagctgtagtcgcagatgaagaaccggtgacgacggtgacttcgccgagtacggaggaatctggcggcggctttggcctctggcaggtgattaaaatcattttatttattggcgttgtcggccatgtattacgccagtttatgcattagggatatcgaatatggacaaggaagaacaatatttactttttgcgctctccacgccgatggaggtgctatatatcggcaatgagccttcgcatacctctccagcaatgtataccggaattcctgctgtcgatctctccgattcatggggggattgataaccgtgaagatcttattcaaaccatctatcggatgacggacgatggtcatgcggcagatttggctcccttttatatccgctggtttacgctatctcctcgtcaatggcgcgaatttaccgcgcagtttggcgagcagggccagatttatgcgcgatttgttgccgaaaccgcactatgctgcgggcgcggaggcattaaagcctgggactatgtgcgtatggggtttttatgccggatgggggtgttgaatcaatggctgacggaagaggaaagcctgtggctgcaatcgcgtatctatgcgcgggcgtactatttttacgacggttggacgcaatattttgccgcctattcgttgggtcggctgtactggcaggctaaaggggacaccatacaggcatatttcgctcacctaaagtacgacgcttcaggcgcgcggatgtttaatgaactggcctctacgacagagagttattatgcgcagctaccgtggcgtccgctcaacgaacaaccgacatgcccggaaacgcttaaaggagtgagcgatttatgaatatctgttgggaaatcctgggcattgaacctaccaccgatctggaatgtatccgtcaggcttatcttgccctgttgccctcattccaccctgagagcgatccgcagggttttaagcgattgcgccaggcctatgaagaagcgcagcactgggccgcctcgcctgcggaggacgcaaaaatggaagaggtgggcgacgaacatgaaatactggtggcgttcagggaattgctggcatcagagcgcgatcgctttcagccctcggcatggcagaaatttattcagcaattgaaccagtgttcaatggatgagatagataagctgcgctggcagttgtgcgacatcgccatgaaaacggaaacgatctcgctgtcttgcctggcattgttggcgcagcgtctgaactggcagccgcaggaagcagaagatgatgctgatggagaagagctggaagcatttctggagaccgtaaagcggggcgatgcgtttgatctgctaagtctggccaaattgcctcttgttgttcaagaccaaactgacgcctacttttttaagcttgagcatatctggcgcttttatcccgaacattttgccgacgctctacaggttcagggcgcctggataattcccgatgataaacagctgcatcgtaaactattacactggtttagcgccgagcagtggggcatggcggaactggtcgatattgctcgtcgctggcaggccgcggagccggataacgaagatgcgcactattacctgtgcaaacagcgtttgctctgcggtgaaggggaaagcctgttggccgacctttgcgatttctggcagcgttatccctccacgcaggcggacgacctgttgctgggctggtgccgccagcatcggcctgatttcttcccgctggcggtgatggcggtcgaagcgcgctgtatggcggatgccgaatatgtccccggtgaaagcgcgcgcacgcgtttactgtgggccgacattttgcacagcggtaggttatcaccgctggggcgttcatttgttgactccctgttttataagcgaaaagcgatggcgtgggcaaattcacggctgagtacccagggggaacccgaaacgccgctgttggatctgtaccggacggcggagcaggtggtgctggaagcgtttcccaaagaaaagcccttttttcgcctgctgatccggctggaggaggggcaatcctgtccgctggaggcgctgataacgcaggcattgtcatctaaaatcgccatgaagccaggcgatattcgtgacaaaaaggagctggcggaagagctcaggctggcggctgagaaagaagagacaaaattgtcttctgaagcgaaaaccgaagcaccccgtcaggcggaatctggcggggtgatgaaaatcatgaagattgtcggtttgatcgcgttgattgtctgcgcgttaaatcgattcttccattttttctgaacaggggtagtgaaagcgccgttacggcgctttcggctcgtcaatacccagatattcacaggcgcgacggcgtacgtcatcgacacgctgcatatcattagacagcagggccgcgtcgaaatcggtaataatctcccccagcatttcgcgctcatcgcctaacgcgcgtgaccactgctcctctaactgtgctttaaacgtccggttaatcagcatatcgcggggataaattttcagcgccagcagccgctcgcggctggcgtcgatttgctgcgtcgtcagtgaggtggcattgtgactgatgattctggattcactcttgccgtcttccagcagcacgtcaacttccagcagaccattaatatcgtagctaaaacgaatatcaatggcctgaatgtgcccgttcggcttcagcatgacgtcaaaagaatcaatcaggatattatttttcaccttatggctttcgccctggtataccctgacgcaaatagagtcctgctcagggtgcatggtggagtacgtttccacttttgacaccggaacggtggtattgcgttcaatgatgggcgagaaaataccaggcactccctgtcggttgacttccacgcccagcgagtaggggcagatatccgtgaggatcacctcttcaacgtcttcatggcgcaggcgacaggcggcctgagttgcggcgccaagcgccacgatggtgctgggatcgtaactttgatagggcaatttaccgaataagcgcaccgcgatgcgttgcaccagcggcatctgtgacgcgccgccgaccagcaccaggctgtcaatttgctccggtttgagtcgggagtcgcgcagcgcctgctcaatgggcgtgcgcagccggttgagcaacggtagccacagggcttccagctcatcgtcataaaacgtgctttccagaacgctctcctgataaagccagctcatgcgcagcggggagctgctggcgcattttgcggcttcaacacaggcatacagcgcagccagatcgctatccgtcagcgctgatttatcgaggttccagcgtttcagcacttcatcaagcaacaaatgcgtgaaatcttcgccgccgaggtagttatcgccagcggaggcgtgaacttcgataatcggcgtagcgtattccagaacggtcacatcaaaggttccgccccccagatcgaaaaccagcgaacggctattttgctgcgtatgcaggccataagccattgccgccgccgtgggttcattgatcaagcgcacggcgtttaaccccgcaagctcagcggcaaggcgtgtatgcttacgctgctcatcgctgaaataagccggaaccgagatcacgacatccttgattggctgctgaaggtagtcttccgcatcttctttcagcgagcgtaaaaccagcgaagataattccggcgcattaaacgactcttcacccaaatgccagtgagtattactgcccattgcgcgtttaaataaggcagcggttttatctggatgagatgttttacgggctgcggcaggttttcccaccagaatttgtttattttcatccatactaattatggatggtgttaaatattcaccaaatttattaggtattaattgtgcggctccgtcttgccagacggcgattaaactattagtggtgccgagatcgataccaatcgctaacgttgcattatccattgcgtttaatttatcgggaaagagagtttatagaataaagaacaccaccctctggcgtggtgatctttatcaatgtcacgcctggcgaaagtattcatccataatgttcgtcaactccgggcgctcgccgtcatcattgatggcgaaatcgaggaaaaaagcatcggcctgtggcgtgcgtttctgggccagtaaacgaaacgccagcgggtagtggcaagcataaccgggtgcgcgagtcagaaaacggacaaaatcaatcaacaagggagaatgggtataaaacagcgcgcgtaacagtacggcgggaaatccctcttcggtgatcccttgcgccatgattttgttgaggccggcttcgctcaaatcgcctgcggcaataatatctgcgcaggccgcaagatcgggataatgcgttgcgcagttagccaatgcgttcggccagttgacgcgggtataacgttcgtcatggcgagtaaagtaatcctcccaaagggatggcggtagtttttcgtactgtattttcagggggatgcggcgctgaaactgggcttcttccaggcgctcgccgtcataaaatcgcaggcattgctgtcgcgtctcgtagcatgtcatcgccaccggctggctgatgacccaggtcttcacgggccggccttccagcgcggcggcggtggctttatggtgaccatcaagcaggacgcaaagccagctgtcattcatataccaggccagcgcgtggctctctggcttatcgcgataatacccggcgcgttgtgggttaaatcgcgatgggggctggcctggcagtaaaaaacagggttcgccggactggtagtgatagtccacgtcagcaatccactgccctgtggtcgcgggattcggttgtttttcgttacccaccgcccagaaaaaatgtccgttgccatctgtgggataaagttcgcgttcctccagtcggtaatagccatcggcaaagagtgaaaacagcggcgtcagggcggtaaatgcttcgttcaacccgactcctggctgattccactcggcaagtgaggataaaaactccgcggcgccttcatcatcattgctaaaaccggcataaacaaattctgcgcaggtcgggcaccaggcttcagtgtaaaaacgaatcagcggcgagccatgccaggaaagcgtatgaataccggcgtcagagtcgggatcgtggataacgctgggacgaagcaatgcttttccgttacgtactgaaaacgtaatatgggctacatcgtgctgtagcaggctgatttcaggtctattgttacgccaaaacatcgctgttcatccctggattctactttgcgctttatgcgtagtattgcagccgttccgccagcaaatcgacaaatccctggcggtctacatcgaccatcaccgtcgcattcggcttattccccgtcaggaaataataatccaccaccgtcatcccctgggtgtatttcccctgggtttccacgccgacccaacgctcaacggtggtgaaaatctcgggcttgagcagccaggcgatggtgcacgggtcgtgcagcggtgcgccgacaaatccccatttttcgtctttgtggtactccataaagaagtccagcagttcggcgacgatggtggaaatcgggttaccgatggcgcgaaagcgttcgatatcggcggcgtgaatctgtgccttatgagtgacgtccagcccggccatcaccaccggaatgcctgactggaagacaatttctgccgcttccgggtcgacgtaaatattaaattccgcagcgggcgtccagttacccagcgccatcgcgccgcccatgatcacaatgcgggcgattttcgtatgcagttccggatggctattcagcagcagcgccacgttggtctgtgggccagtggagacgatggtgaccggttgtgcgctctcgcgcagcgtttttgccatcagctcaacggcagtgccgctttgcggggcgaatgacggctcgggcagcgccgggccgtcgaggccgctttcgccgtgaacgttatcggcgataatcagttcgcgcatgagaggtttcaccgcgccgcccgccaccggaatatccaggcgtttgagcagtgtcagcatccgcagcacgttgcgcagggtcttctccggcgtctggttaccggcggaagaggtgatcgctttcacttccagttcaggggaggcgagggcgagaacgagggcgatcgcgtcatcatgacccggatcgcaatcaataataatgggcagtgccattgtggctccttgtaagcggtactttgtgacaaggttaacgcccggctggatacgtttcgagaagcgaagaagtaaagcgtgagatagcgcgcactctgacgtgcgcgccgggaagattagtgcaggattttcgcaaggaagtcttttgcgcgatcggaactggggttagcgaagaactcctcttttggcgaatcttcgacgattttaccttcatccataaagatcacccggttagccactttacgggcaaagcccatttcgtgcgtcaccaccatcatggtcatcccttcgttcgccagctcgaccattacgtccagtacctcgttgatcatttccggatcgagcgctgaagttggttcatcgaataacatggcaatggggtccatacatagcgcgcgggcgatcgccacgcgttgttgctgaccgccggaaagctgcgccgggaacttgttggcatgtgcagacaggccaacgcgctccagcagcttcaggcctttatcgcgggcggcggccttatcgcgtttcagcactttcacctgcgccagcgtcaggttttcgatgatcgacaggtggggaaacagctcgaagtgctggaataccatgcccacgcgggaacgcagtttcgccagatcggtttttttgtcgttcacaataatgccgttaacggtaatttcgcctttttgcactggttccagaccgttgacggtcttaattagcgtggatttaccggaacccgatggcccgcagactactaccacctcaccttttttcacttctgttgaacaatcggtcagcacctgaaagtgaccataccattttgaaacatttttcagggtaatcattaaacagtccttttcttcaaatagctgaccagcaacgacgcgctcaggctgataacaaaataaacggcgccggcgaacagaatcatttcgacctgagtaccgtcacgctcgccgatagtcgacgcggtgcggaagaagtccgccaggctgagtacataaactaaagaggtgtcctgaaatagcacgatgccctgcgtaagcaacagcggcaccatcgcccgaaacgcctgcggcagaataatgagcttcatcgactgccagtgggtcatccccagcgccagcgcggcgctggactgcccgcgggaaatactttgaataccggcgcgaataatctcggaatagtaggccgcttcaaacatggagaatgccaccatcgcggagatcaggcggatatcggttttcggcgatagtcccagcacgttttgcagaaagccgggtacaatcagatagaaccacagcaagaccatcaccaacgggatggaacggaaaacgttaacatacgctttagcaaaccaggcgataggggcaaagcttgagaggcgcatgacggccagaatggttccccagactatccccacgataacggcggtgacggtgatcttcagcgtgatgaccaacccggccagtaggtaaggcagtgaggggataatcgaactccagtcaaattcgtacattatttgctccccacgttgcccggcaggcggactttgcgttcaaccaggctcatgaccagcatgataacggcgttaatcagcacataggccagcgtaatggcggtgaaggattcccaggcgtgcgccgagtaatccaacagtttgcctgcctgcgccgccatatccaccaggccgatggttgaggcaatagccgagtttttcaccaggttcatcatctctgacgtcattggcggtacgataacgcgataggcattcggcagcaggacatagcgataagcctgcggcagcgttagccccatcgccagcgccgcgttcttctgcccgcgaggcagagactgaatcgcggcgcgcacctgttcgcaaacgcgggcggcggtaaacagtcccagacagatcattgaggagaggaaaaactgaatattgggatcgagttccgccttaaaccacatgccaagatcttccggcaacagttcaggcaccaccaggtaccaggtgaagaattgcacgatcagcggcacattacggaacagttctacgtacaacgtgcccagtccggagaggaaacggttgggaacggtacgtaaaatgccgaaaatagatcctaccaggaaagcgataatccaggcggtaatcgaaagggcgacggtgacctgaaaaccactccatagccagccgagataggtggtattgccgaagggggcttcctgtaaaaaaataccccagttccagtctattgacatacatctactccgaaaaaaaagggtagcagcgctaccctcgaagattgttgcccggcgatttgcggcttcaggcccgatggggaacgaccatcaggcttatagtctgtccgtgctgagcgacaatcgagaggacaggagtcccgtcccatttagttttagttagttaagcgctttatcattcggtgctttgaacagggctttcatctcgtcagacaactcgaaattcatgttcaggtttttcggtgggatcggatttttaaaccacttatcaaaccacttttccgcttcgccggaggtttgcgcctgggcgatggtatcgtccatcagctttttaaactcaggggcgtttttacgcagcatacagccgtaggcttcctgggactgcggtttaccgacaatctcccagttatccggtttcttggctttggcgcgctcgccggccagcagcgcgtcatccatcataaaggcgacggcgcgaccgctttccagggtgcggaacgagtcaccgtggtctttcgcgctaataatacgcatccccatcttttgctcttcgttaagcttatgcagcagaatttcagaggtcgtcccggaggtgacgacgaccgctttgcctttcagatccgggaaatctttaatatcgccgccttttttagtcagcagtcgcgtcccgacgacgaaaatcgtatcggagaaggcggcctgtttctggcgctcaaggttgttagtcgttgaaccacattcaaaatcgaaggttccgttttgcaatagtggaatacggttttgcgaggtgatcgggatcagcttcacctgcagatcgggcttgttaagtttcttttttaccgcttccacaatggcgttggagtagtcctgggaatagccgaccactttctgctggttgtcgtaataagaaaagggcacagaagattcgcgatgcccgacgacgatcacgccatttttagcgatcttgtccagggtgctaccagcggcaggcgcgccatcttctgcgtgcgcaaggcccgcagacagtcccatgaccagcattgctgtggttagcttacgtaattgcatatccaactcctttatcatctgcgccgtcgacgcattgatagctattgtgatgttgttattgcctgcaacttgcgcgtgcagtgttatgtgtgtttgttaacatttagtgtggcttgttgtaaatattttgctgcgatattgtttatttttgcgaagtgcgccgcaccgttcagaggcaaaaatcctacattgcaccgttcaggtgctaccgatgatcgattttggtgcgaccaggttgcacaagcagccagaacaggtttgccatgtttaacaaagcaatagacgtgccagaatgggggaaaaaggaggattttcaggccggataaatgaagcgctatccggcctggggagagattatttccgtcgttgtcgcagactcatcactaccgcgccaaaagcaaacagcgcggtcagtacccatagcggccagttgccggtacgggcatagggagttaaccccgtggttggcgtgacattggtggtcagtacctggcgtgtgaactgcgggatcatcgcctgaatctcgccctgagggccaatcaccgccgtaataccgttattagtactgcgcagcaacggacgcgccagctccagcgaacgcatccgcgccatctggaaatgttgccacgggccaatggacttaccaaaccaggcgtcgttagaaatcgtcagcagatagtcggtgtccgggcggaagttatcccgcacctgttcgccaagaataatttcatagcagattgccgccgtcagcttatagtcgtgcgcatgtaactgcggctggatataagggccgcggctaaaggaggacatgggcagatcgaagaacggcgccagcggacgcaggatagactccagcggaacgaactcgccaaagggcacaaggtgatttttattgtagcgattgggcgagtcataactgtatggattatccttgcccaacgtaataatcgtattgtaggtgtcgtatcgattctgtttattgagacgcgcatcgacaataccggtgatcagcgtgctatttttttcgcgtaacatctcgtccagcgaacgaaggaagggctgctgattgatttcgagatccggaatcgccgactcaggccagataataatctgtgatttgcctaactctgggcgagtttcgttgagataaatttttagcgtattcagtagctggttttcgtcccacttcagcgactgcgggatatcgccctgcaccagcgatacctgggtcgctttggccggttccagcgtaaaccactggatataacgtagcggaaagggcaaagcaaacagaatcacggcgacagccagcggacgccagttccgcgtcgccagtgccagcgctaacaggccgctgaccatcatcagcaggaagttgatcgcttcgacgcccattaccggcgccaggccttttagcgggccatcgacctgactatagccaaattgcagccaggggaagccggtcagcacccagccgcgtaaaaattcggtgatttgccatattgcaggcgcggcgatagcgacgcgcagccagttggtttttggccacaggcgcgacaaaatcccggcaaacagtccggtatacagcgagagataagctgcaagcagcaccaccagaaaaacgttaaccgggcccggcatgccgccaaactgcgcgatactgacataaacccagttaatcccgctaccgaaaagtccgagtccccagcaatagccgatggcggcagactggagcgggcggcgattaaacgttaaggcctgcagcccgataagcgacactatcgctgcgggccagacgtcatacggagagaaagccagtgttccgcaggcgccgaataataacgccagcagcaggcgaatacgctggcgttcaattaacgaggcaaatgccatttttagtccactattgctgttattcgtccagttttggctggggcgagtcatccgggatcctgacatgcacctgaataatacgacgactatcggccatcgccactttgaactggtaaccatcaatgtcaatggtttcgccgcgggccggtaaatggccgaacgcctgcatcaccagcccgccgatggtatcgacctcttcatcgctgaagtgggtgccgaaagcgtcattgaagtcttcaatcgacgccagcgcgcgaatcgtccaggtatggcggctaagctgacggaagtcgatatcgtcttcttcgtcatactcatcttcaatttcaccgacaatcagttcgaggatgtcttcgatagtcacaaggccggaaacgccgccaaactcatcgataacgatggccatatggtagcgctgggagcggaattccttgagcatacggtcaacccgtttgctttccggtacgacaaccgcggtgcgtaacactttgtccatgctgaaggcttcggcatcgctgcgcataaacggcagcaaatctttggccatcagaatcccttcaatgtgatctttatcttcgctgatcaccggaaaacgcgagtgggcggactcgatgataacatcaagacattcgtccagcgtctggttgcgttttagggtaatcatctgggagcgcgggatcataatatcgcgaacgcgctggtcggcgatgtccattacgccttcgagcatatcgcgcgtatcttcatcgataagctcgttctgcccggaatcacggatcagcgccagcaactcatcacggtttttaggttcaccgtggaaaagctggctgagtagcagggaaaaaaatccctttttactgtttactgtgtcactactgtgtgaattgtcgtcgctcatggcgtcgtatgggttctcatgttagttaatacaaagctcgtcatgcgtatactcagctgtgacggcatgttttgcctgatggcgctacgcttatcaggcctacaaaaggcatgaatgtaggccggataaggcgcaagcgccgccatccggcaagctactattctgcaatcttctcggcaatgtacggatcctcatagcccatagcaagcataatctccgtttcgagagactccatctcttccgcttcgtcatcgtcgatatgatcgtaacccagcaaatgcaggctaccgtgcacgaccatgtgcgcccagtgcgcctccagcggcttgctctgttcttgcgcttcctgctccacgacctgacggcaaataatcagatcgcccagtagcggcatttcaatgccggcgggcgcttcaaacgggaaggagagaacattagtgggtttatctttcccgcggtacgtcaaattaaggtcgtggctttcggcctcatccaccagacggattgtgacttccgcctcttcctgaaactgcggaataacgccgtccagccagcgttgaaactgagcttcatccggcaggcccgcgtggttttcacaggccaactgtaaatcgaggatcacctggctcatttctgttcctgctcctgggcttcacgcttacgctctgccgccaacgccgctttgcgtttttgttcggcctcttcccaggcttcataggcgttaacaatgcgggcaacgaccggatggcgcaccacgtcttcgctgtggaagaagttgaaactgatttcatcgacttccgccagcacttcaatggcatgacgcaagccggatttggtgttgcgtggcaggtcaatctgcgtcacgtcgccggtgatcaccgctttcgagttaaagccgatacgcgtcaggaacatcttcatctgttcgatagtggtgttctggctttcatccagaatgataaaggcgtcgtttaatgtgcgtccgcgcatataggccagcggcgcgacttcaatcacattgcgttcaatcagcttctcgactttttcaaagccgagcatttcgaacagcgcgtcatacagcggacgcaggtacgggtccaccttctgacttaaatcgcctggcagaaagccgagtttttcgcccgcttccaccgccggacgggtcagtagaatacggcgaatctcctggcgctccagggcgtctaccgcagcggcgaccgcaagatacgttttaccggtacccgccgggccgacgccaaaggtaatatcatgatcgagaatattggcgatgtactgcgcctggttcggggtacgcggtttaatcacgccgcgcttggttttgatattaatagctttgccatagtcaggcacgctttccgcgctctgttccagcacccgcgcttctttgatcgccagatgaatttgttccggttcgatatcctgagtctggccgcgcatcggtgcggtatcgacatacagacttcgcaaaatatctgtcgccgcggtcacgcaaatcggacgaccggtcagtttaaagtgattgtcacggcggttgatttcaataccgagacgacgttcgagctgtttaatattgtcatcaaacggcccgcaaaggctcaacagacgggcgttgtctgcgggctcaagggtaatttcgcgagtgtctatattcaaactgttcctcttgtgtctgtatcgccggacgctgaacacttaccggcatctaaggaaattattcacgccatagggaaaaggcgcaagcattgcaatgaagatggggatgaagagagaaaattgcaaggcccgtcgggcgacaggccatgaccaggaagcccgacaggcgtagcgccatcgggcattattgccttttcagtagggttaaggctggtagaatcctacgcccagctcattttctttacgggtacgggcaatgacggactccggcgtttcggcgacgcgcagccccatttcatcttcggtacgcaccacttttccgcgcagggagttcggatagacgtcagtaatttccacatcgacaaacttaccaatcatctccggcgtgccttcaaagttcaccacccgattgttttcggtacggccagacagttccataatgtttttacgcgacgtgccttccaccagaatgcgctgtgtcgtgccgagcatacggcggctccatgccatcgcctgctgattgatacgctcttgcagaatatacagacgctgcttcttctcttcttccggcacgtcatcaaccatatcggcagccggcgttcccggacgcgcagagaagataaagctgtagctcatatcaaagttgacgtcagcgataagcttcatggttttttcgaaatcatcggtagtttcgccagggaatccgacgataaagtcagagcttatctgaatgtccggccgcgccgcgcgcagtttacggatgattgctttatattccagcgcagtgtgggtgcgccccatcagattcaacacgcgatcggaaccgctctgtaccggcagatgcaggaaactgaccagttccggcgtatcgcggtatacctcgataatatcgtcggtgaactcaatcggatggctggtggtaaagcgaatacggtcaatgccgtcgatggcggcaaccagacgcagcagatcggcaaaggtaccggtggtgccgtcgtagttttctccgcgccaggcgttaacgttctggcccagcaggttgacctcacgcacgccctgcgccgctaactgggcgatttcgaacaggatatcgtctgagggacggctgacttcttcaccgcgggtatacggtaccacacagtaagtacaatatttattgcagccttccatgatagaaacgaaagcggtcgggccttctgcgcgcggttccggcaaacggtcgaacttctcgatttccgggaagctgatatcgaccaccgggctgcggtcgccacgcacggagttaatcatctccggtaggcggtgtaaggtttgcgggccaaaaataatgtcgacgtaatgggcgcgttgacgaatgtgctcgccttcctgggaagccacgcagccgccgacgccgataatcagatcgggatttttctcttttaacagtctccagcgacctaattgatggaagactttttcctgagccttctcgcggattgagcaggtattcaacagcagcacatccgcctcttccgccacgtcggtcagttgatagccgtgggtggcgtccagcagatcggccatcttcgatgaatcgtactcgttcatctgacagccccaggttttaatatggagttttttagtcatcgacttgctcttgcgaaatagtggctgaaaagcagggcgcatagtgtaatgctttggcgcggttgtgaccagtatgactgacgtcagccctaatgggtaaaaaatcctgtaaacttgtctaaaacgtaacaggatgaatgaccatgacaaatcaaccaacggaaattgccattgtcggcgggggaatggtcggcggcgcgctggcgctgggtctggcgcagcaagggtttacggtgatggtaatagaacatgccgcgcctgcgccgtttgtggcggacagccagcctgacgtgcggatttcggccattagcgcggcatccgtggcgctgctcaagggactgggcgtttgggaggcggtgcaggggatgcgtagccatccttatcggcgactggagacctgggagtgggaaaacgcccatgtggtgttcgacgccgctgaactcaagctgccgctgttaggctatatggtagagaacaacgtcctgcaacaggcgctatggcaggcgctggaagcgcaccccggcgtgacgctgcgcgttccggcttcactggcggcattgcaacgccgccacgatggttatgcgctggaactggccgacggcgaatgtatcacgccgaagttagtgattggcgccgacggcgcgaattcgcaggttcggcaaatggcgggaattggcattcatgcctggcaatatgcgcagtcgtgtatgcttatcaccgtcaagtgtgaaaatgcgccaggcgacagcacctggcagcagtttacgccaacggggccgcgcgcctttttgccgctgttcgatgattgggcgtcgctggtgtggtatgacgctccggcacgtattcgccagttgcagggtttatcgatgacgcaattgcaggtggaaattaaccagcactttccggcgcgtctgggggcggtgatgcctgtcgcggcgggcgcgtttccgctaacccgtcgtcacgcgttgcagtatgcgcaaccggggctggcgctggtaggcgacgcggcgcataccattcatccgctggccgggcagggcgtcaacctggggtatcgggatgttgatgcgttgattgatgtgctggcgagtgcccgtagctatggcgagtcctgggccagccattcggtgttgaaacgctatcagacgcggcgcatggcagataattttatgatgcaaagtggaatggatctgttttatgccgggttcagcaatgaactgccgccgctgcgtattttacgcaatatggggctgatggcggcgcagcgcgcaggcgtgctaaaacgtcaggcgcttaagtatgcgttggggttgtaacccgttgaatgccttacccggtttgtaaaaacgctcaattgcaggtcgggtaagcgtattgacatcttactttactgcaaataaagcacataaacctaatttccctttaaaatcaatttcataccaaggtgatgccatttcaattgtgcatacgttgtattggcaacgtactactttatgtagcatcagtaatgtggaactcattgattttacaagaatcgccagggtgattaatgcggcgataatccgataccacgtcagtgttgcatgttggacatcaaaccacagaatataaaaagtgatgatgtgaagaatgactttgctggacagggcgcgaatatagaatccacgcagcgccgttttcgaggaaaacgcgacattaatcagcgcgctttgtttttcttgcacagggatccctggcagatacactatccattccgcactattctggcgcaacatgacggcctttttctggtgcagtatatgtagcctcattgacactgccacggggtaaaccagacccaaaataatcaaccaggcggcgctggccgtgatatcaatgaaggtgaaagcgcagagcaagacgaccataaaaaatgttaatggccgcaaaaagagataccaacaaaactggtaattcattgtgaggttaccgaacgatccctgtaaggctttatcatagcgttttactgatagcagggcattaagggggaaacctctttcggaatttataaacgcagaaaagcaaaaagctcgccgaagcgagctttttaaaggtggctggggtacgaggattcgaacctcggaatgccggaatcagaatccggtgccttaccgcttggcgataccccaattgtcgtacttcttgacgctacattagcagagcgtctttaaaactggctggggtacgaggattcgaacctcggaatgccggaatcagaatccggtgccttaccgcttggcgataccccaacaaattattttcgaaccggtcgaatacctcgacgtgttctgaatatggtggctacgacgggattcgaacctgtgaccccatcattatgagtgatgtgctctaaccaactgagctacgtagccagatgatttcttcgatggctggggtacctggattcgaaccagggaatgccggtatcaaaaaccggtgccttaccgcttggcgataccccaataccgtcgcggtgaaccgcaaactcgaagaaatatggctggggtacctggattcgaaccagggaatgccggtatcaaaaaccggtgccttaccgcttggcgataccccatccgtacaacgcttatcggtgaatggtgcgggaggcgagacttgaactcgcacaccttgcggcgccagaacctaaatctggtgcgtctaccaatttcgccactcccgcaaaaaagatggtggctacgacgggattcgaacctgtgaccccatcattatgagtgatgtgctctaaccaactgagctacgtagccatctttttttcgcgttaccttatcggcgttgcggggcgcattatgcgtattgagccttgaagcgtcaacctctttttcatcgaaaaacgtcggaaagtgtctgtttggttaggttgcgaacagcgtggcgcaatattcggcaattattggttattaatcgtttttccgaaagtagtttgctataaaaaaagagcccctaagggctctttcgtcatcgttaatttactggtacgccgactgatgcacgccgaccgcgcggcctgacgggtcatccatcgttttgaatgcttcatcccactcaatggctttggcggaagaacaggccacggacgggccgccgggtacgcattccgccgcgctcggcaccgggaacagctcttcaaaaatttcgcggtacagatacgcctctttagacgacggcgtgttgtatggaaagcggaagcgggcggtttccagttgttgatcggaaatctgtttcgccgccacctctttcagcgtatcaatccagctgtaacctacgccgtcagagaattgctctttctgacgccacgcgacgcttgctggcagataagactcgaagcactcgcgcagcacgtgtttttccatcttgccgttgccgcacattttatcctgtgggttgatacgcatcgccacgtcgaggaattttttatccaggaacggtacgcgcgcttccacgccccaggcggacatcgctttgttggcgcgggcgcagtcatacatatgcagcgcctgtagcttacggaccgtctcttcatgtaactctttggcgttcggcgctttatggaagtacaggtagccgccaaacacctcatcggaaccttcgccggagagcaccattttgatgcccatcgctttgatcttacgcgacatcagatacatcggcgttgaggcgcggatagtggtcacgtcataggtttcaatgtggtagataacatcacgaatggcatcaaggccttcctgcacggtgaagtgaatttcatggtgcacggtgccgaggtggttagccacttcctgggccgccttcaggtcaggcgaaccttccagaccgaccgcaaaagagtgcaactgtggccaccaggcttcggagcgctcctgatcttcgacgcgacgggcggcgaattttttggtgattgccgaaataaccgacgagtccagaccgccggagagcagcacgccataagggacgtcggacatcaggtggcttttcacggattcttccagcgcctggcgcagcgcgtttttgtcggtaacgttgtcttttaccgcatcgaactcaaaccagtcgcgctgatagtactgacgaatttcgccgtctttgctccacaggtagctgcccgccgggaactctttaatggtgcggcagaccggggtcagcgctttcatttctgacgctacgtagaagttgccgaattcgtcataacccatatagagcggaataataccgatatggtcacgaccaatcagataagcgtctttttcgctgtcatacagggcgaaggcgaacatcccctgtaaatcgtcaaggaaatccggccctttttcctgatacagcgcgagaataacttcgcagtcggagcctgtctggaacgcgtaacgatcgccatactccgcgcgtaacgtctgatggttataaatttcaccgttcaccgccagtacgtgggtttttctggcgttatacaggggctgggcgccagcgttaacatcaacaatcgacaagcgttcatgtgcgagaatcgcgttatcgcaagcgtagatgccggaccagtccgggccgcgatggcgcatcaggcgtgacagttcaagggcttttttacgcagttccgctgcatctgttttgatatcgaatacgccgaaaatagaacacatagccttctccgttaatctgttgcgtcgtactttttgtatttgcttgactaaaaaatgccgcaaaggcgtggaaggcgcaaggggattacggtctgaaaaatgaaaaatgcaatcgtcattgttgattagtgaaaaatgattacgtattgcgcggatttattgatggatcttcagttttatcgtggattaattgaattatgtttttcctgatggcgtttcgcttatcagacctacaatgttgttcgaaccgtaggcctgaaagctatgcgtcatcaggcagaggacaggtttagataacgtctatctcggcgacggaagggtaaatccagcttgggcggaacggcatactgtcaatatcattgatcgttgatacgcctgaaagcaccagaatggtctccagaccggcctggaaccccgccagaatgtcggtgcgcaggttatcgccgacaataacggtctcttccgagtgcgcctgcattttgtttaacgccgcgcggatgatccacgggctgggtttgccgacataaaatggcttccggccggaaattttttcaatgcctgcgcacagcgcgccgcaggccggataaaagccgcgaccgtgggtatccgggttggtggcgataaagcgcgcgccattggcgacgaaaaatgctgctttatgcatcatgtcccagttgtaggagcgggtttctccaacgatgacaaaatcagggttcacatcggtaatggtaaaacccgctttatagagctcgtgaataagcgcgccttcgcccacgacatacgcttttttaccttcctgacggcgcagaaaatcggctgtcgccattgctgacgtataaaacacgctgtccggcacgttaacgccagcggtagcaaaacggttcgccagatcctggccggtttgcgatgggtaattggtcagcagcaccagcggcagacctttttccagaatccccgtcagaaattccgccgcaccgggtacggctacgttgtcgtgcatcagcacgccgtcgatatcgcagattacattcttgatggtcatgaactacccagggaatttgtgaataatccgatactataagagcgcatcaactttccagcaaacattgcagcaatgttccgttgagcatggcgcgtttaactaaggcaaatgcgccgatagcagaacggtgatccagcgtggagcgtaccaccggcaaatttttgcgaaatgcctttaacgcctgcgtattgatacagctttcgatagcgggtaacaggactttatcggcttcaatgatctcgccggcaatgacgattttttgcggattaaacaggttgatagcaatggcgatcgttttgcccaaatggcgaccaacatgctcaatgacttccgaggccaggctgtcgccccggtttgccgccttacagatggttttaatcgtgcagtcgtcaagcggaacacggctttgatacccttgtttaagcaaattcagcacccgttgttcaatcgccgcattggcggcaatggtttccagacagccgaaattaccgcagtggcagcgctcgcccagcggctccacctgaatatgcccaatttcaccgacgttgccgttacggccaatgaagatgcgtccgttggagataatcccggcgcctgtaccacgatgaacgcgcaccagaatcgagtcctcgcaatcctgactggcgccgaagtagtgttccgccagcgccaggctacggatatcgtgtcccacgaaacaggtaacgtgaaaccgtttttccagcgcttcgaccagtccccagttttcaacctgaatgtgcggcatgtaacgaatcacgccgctttccggatcgacaagccctggcaggatcaccgagatagcgatcaattcacgaattttacgctgacagctatcaataaagacggcgatagtgttgagcagcgcatgttccagcgtctcctgggtgcgctccggcagcggataatgctcctcagcgaccactttactgctcagatcgtagagcgttaaagtggtgtcatgacgccccaggcgaacgccaatggcgtggaagttacgggtttccgtgacgatagagatagcgcggcggcctccggtagaggcctgctgatcgacttctttgatcagcccgcgttcaatgagttgacgcgtaattttcgttacgctggcgggagcaagctggctttgctcggcaatttgtatgcgcgagataggaccatgctggtcaatcaggcggtaaacggccgcgctgttaagctgttttacgagatcaacgttacctatctgagcttgtccgcctggtgtcatattctcacttactcaagtcaacgacctcgtcaccattaacgatggtcttgataattttaaaatcgtgggtgaacgcggtcaggttggcgactttacccggcgcaatgctaccgagatgtttatcaacgccgatagcgcgagccggatagagcgttgccatgcgcagcacttcatccagcgcgatgccgcaatgcgcgaccaggttgcgtacgccttcaatcatggttaaggacgaaccgctcaacgtaccgttttcatccacacacagtccattgcggtagtatattgttttacctgcgaaaatgaactgctcaatattggcccccgccggtgcggtggcgtctgtcaccagacaaagtttgtcgcctttcaggcgtttggcattgcgaatgttggcgtagtcgacatgcagaccatcggcgataacgccgcaataaatatccgcttcgtccagaacagcgccagcaaggcccggctcacgccctgtaatgtacggcatcgcgttaaacaggtgagtcgcaaaggtaatcccggcgcggaagcccgctttcgcctcttttaacgtcgcgttggagtgacctgcggaaaccacaatgcccgcattcgccagtttagcgattacgtcagcaggcaccatttccggcgcgagtgtgactttggtgatgacgtcggcattatcgcataagaaatcgaccagcgcagcgtctggtttacgcacgaaatcaggattatgggtgcctttttttaccagattaagccaggggccttccaggtggagacccagcgcctggtgcggatgtttttccaggtattcgcgcatgacgcgaatgccctgtttcatcaattcgtcgctggtagtgataagcgttggcagaaagttagtacagcccgatttttcattggctttctgcataatttccagcgtttcaacgctgacggcttctgcggtatcgttaaactgcacgccgccgcagccgtttagctgcacatcaataaaaccgggggagagaatggccccattcaatgagcgttgttctattcccggcggcagttcggccatcggacaaacgcggtcaatcaggccattagcgacaacaagcgcatggtcatcaagaatttcgtgaccggtaaagatccggccctgggttaaagcatacattccgacccccgatatcaaaaatttaccgccccgcattgactggcggggcggagacaacattacagacctttaatattttctgcttctaattcattgaaatatttcaatgttttaactttaagttccattgtggacggctcatcgcataccacaaccgctttcggatggagttgcaggcagctaatggtccacatgtggttgacgttgccttcaaccgccgcctgcagcgcctgggctttctgatggcccagcaccagaatcatcacttcttccgcatccagcagagtacccacgcctaccgtcagcgcgtatttcggcacctggtttacgtcgccgtcaaagaagcgggagttcgctacgcgagtatcatgggttaacgttttgatacgggtgcgggaagccagggaagacgccggttcgttaaaggcgatgtgaccgtcgttgccgacgccgcccataaacagatggattttaccgtaagaacgaattttttcttcatattgacggcattctgcatcgatatccggtgcgttaccgttgagaagattgatgttttctgctggaatatcaacgtgatcgaaaaagttacgatgcataaagctgtggtagctttccggatgctctttcggcaggccaacatattcgtccatattaaaggtgaccacatgcttaaagctgacctcgcccgctttgtgcatctcaaccagcgctttgtacgccgttagcggcgtgccgccggtaggcagtccaaggacaaacggacgatcggcggtcggtttgaacgcattaatacggttaacgatatggcgagcggcccatttgccaacctgttctgcggtactcagggggatcagtctcattcttcacctcaataatcaatgtcaaaatttggcggatcgtattaagcgtaacctggatatccagggttcgtgttcaatccgtcctgattttttgaatcataaaataagttttctgtgttagccagtggatggtaggggtgattacgatatttagtgattataatcacaaaaaacacccgtttaatttgcgaggcgaattaattttccacacactctgcagaagatgatctcaccgttcgattacagaacatcacgtttttaacgtttgcagcacaataaaaaacggcttcaaagaagccatatcggcgtctcgtagggggaataagatgaatattttaggttttttccagcggctgggtagggcgttgcagctccctatcgccgtgttgccggtggcagcgttgttgctgcgattcggccaaccagatttgctgaatatgccgtttatcgcgcaagcgggcgggtctattttcgataacctggcgctggttttcgctatcggcgtggcctccagttggtctaaagatagcgcgggcgcggcagcgctggcgggagccgtgggttacttcgtcatgaccaaagcgatggtgacgattaacccggaaatcaacatgggcgtgctggcggggattattaccggtctggtcggcggcgcggtttataatcgctggtctggtatcaaactgcctgattttctcagtttcttcggtggaaaacgttttgtaccgatcgcaacgggctttttctgtctggtgctggccgctattttcggttacgtctggccgccggtacagcatggcatccatgcgggcggtgaatggatcgtttccgcaggcgcgctgggttccggtatctttggcttcatcaaccgtctgctgatccccaccggtctgcatcaggtactgaacaccatcgcctggttccagattggcgaattcaccaatgccgcaggcactgtattccacggcgacatcaaccgcttctatgctggcgacggcacggcggggatgtttatgtccggcttcttcccgatcatgatgtttggtctgccgggcgccgctctggcgatgtatttcgccgcgccgaaagaacgtcgtccgatggtgggcggtatgctgctgtctgtcgcgatcaccgcgtttctgaccggcgtaaccgagccgctggaattcctgtttatgttcctggcgccgctgctgtacctcctgcacgccattttgactggtatcagcctgttcgtcgcgacgttgctgggtatccatgcgggcttctctttctcggcaggcgcgatcgactatgttctgatgtataacctgccagcggccagcaataacgtctggatgttgctggtgatgggcgttgtattctttatcatctacttcctgctgttcagcgcggttattcgtatgtttaacctgaaaacgccgggccgcgaagataaagttgatgagatggtaacggaagaagccaacagcaacaccgaagaagggttaacgcaactggcgaccagctatattgctgcggttggcggtacggacaacctgaaagcgatcgatgcgtgtattacccgtctgcgcctgaccgtgaatgactctgctcgcgttaacgatgcggcctgcaaacgcctcggcgcttccggcgtggtgaaactgaacaaacagaccattcaggttattgtcggcgcgaaagcggaatcgattggcgatgaaatgaagaaagtggtggcgcggggaccggtcgcggcagcgtctgctgatgcggctcacgttgcaacacctgctccggcggccaaaccccaggcggtgccgaatgcggtaactatcgctgaactggtctctccgattaccggtgaggtagtggcgctggatcaggtaccggatgaagctttcgccagcaaagcggtcggcgacggcgtggcggtgaaacccaccgataaaaccgtggtttctccggcggcgggtactatcgtgaaaatcttcaacactaaccacgcgttctgtctggaaaccgaaaaaggcgcggagatcgttgtccatatgggtatcgataccgtcgcgctgaacggtcagggctttaagcgtctggtagaagagggtgcggaagtcacggcgggtcagccggtgctggaactggatctggacttcctgaatgccaatgcgcgttccatgataagcccggttgtttgcagcaacagcgatgacttcagcgctctggtcatcaaagcggatggtcacgtggtagcgggtaaaacgccactgtacgagatcaagagcaaataatcgcttcctggccggataaggcgtaagacgccatccggcgatatcacaggaaacataagcggcagagggaaaccttcgccgcttttttttaccgcaattagccccaatattttctgcaaagccactttttaagtaactaaaggttgtcagtctgtccggcttataagatcatatgccgttatacgttgtttacgctttgaggaatccacgatgagtgaggctgaagcccgcccgactaactttattcgtcagattattgatgaagatctggcgagtggtaaacataccactgtccatacccgttttccgccggagccgaatggctatctgcatatcggccacgcgaaatctatctgcctgaactttggcatcgcgcaagattatcagggccagtgcaacctgcgtttcgatgacaccaacccggtaaaagaagatatcgagtacgttgattcgatcaaaaacgacgtcgagtggttaggctttcactggtctggcgatattcgctactcctccgattactttgaccaactgcacgcctatgcggtcgagctaatcaataaaggcctggcctatgttgatgagctgacgccggagcagatccgtgaataccgcggtacgctgaccgcgccgggtaaaaacagcccgttccgcgatcgcagcgtcgaagagaacctcgcgctatttgaaaaaatgcgtaccggcggttttgaagagggtaaagcctgtctgcgcgctaaaatcgacatggcgtcgccgtttatcgtgatgcgcgatccggtgctgtatcgcattaaattcgccgagcatcatcagactggcaacaagtggtgcatctatccgatgtacgactttactcactgcatcagcgatgcgctggaaggcattactcattctctgtgtacgctggagttccaggataaccgtcgtctgtacgactgggtgctggacaacatcaccattccggttcacccgcgccagtacgaattctcgcgcctgaatctggaatacaccgtgatgtccaagcgtaagctgaacctgctggtgaccgacaaacacgtcgaaggttgggacgatccgcgtatgccgactatttccggtctgcgccgtcgcggctataccgcggcttctattcgtgagttctgcaaacgcatcggcgtcaccaagcaggacaacactattgagatggcgtcgctggaatcctgcattcgcgaagatctgaacgaaaacgcgccgcgcgcgatggcggtaatcgatccggtaaaactggttatcgaaaattacccgcagggtgagagcgaaatggttaccatgcctaaccatccgaataaaccggagatgggcagccgtgaagtgccgtttagcggtgagatctggatcgatcgcgcagatttccgcgaagaagcgaacaaacagtacaaacgtctggtgatgggcaaagaagtgcgtctgcgtaatgcctacgtcattaaagcggagcgcgtagagaaggatgccgaaggggatatcaccaccatcttctgtacctatgatgctgatacgctgagtaaagatccggctgacgggcgtaaagtgaaaggcgtaatccactgggttagcgcagcacatgcgctgccgattgaaattcgtctctacgaccgtctgttcagcgtgccgaatccgggcgccgcggaggacttcctgtctgttatcaaccccgaatcattagtgattaagcaggggtatggcgagccgtcgctgaaagcggcggtagcaggaaaagctttccagtttgaacgtgaaggctacttctgcctcgacagccgctatgcaacggccgataagctggtctttaaccgcaccgtgggcctgcgtgatacctgggcgaaagcgggcgagtaagcactgcgccaacaggcgaatgctgtaaaaataccttgtcaacgccgcgttctgcggcgttttttctctgcatttctaagtcgattctcttttttgcgaggcgaattaattattctctgaaaattattgatctgataaatgattattaatctaaatgttataagcgtcaggtcaacaggagacaattattttcatgcctatggaaaacaagtcaattttctttctggcggtctgcttcccccaccagcagtcgaatgtaacagaaagcaattaaatatgtgcggttgctcatattattacatactggttacagaaagagattgataattcgcatcgcgaaaaatagtctatttaacgtagtaaatgaggtttctcagcgctactttttattttttcgctgttcgcttttgtcggcagcaatttatacgtcaaagaggattaacttatgcgtacgtttagtggcaaacgtagtacgctggctctggctatcgccggtatcacagcaatgtcggggtggatcgttgttccgcaggcgcaagcctccggctttttcgacgactccacgttaacgggcggcatctattattggcagcgtgaacgcgatcgcaaagatgtgaccgacggcgacaaatataaaactaacctttctcatgcgacctggaacgctaacctggattttcagtctggttacgctgcggatatgttcggtctggatatcgcggcgtttaccgcgattgaaatggcagaaaacggcgacagcggtcatccaaacgaaattgccttctcgaaaaagaataaaggctacgacgaagactattccggcgataagagcggtatcagtctttataaagccgcagcgaaatttaaatatggcccggtctgggcgcgcgccggttatattcagcctaccggtcagacgctgttagcgccgcactggagttttatgccgggtacctatcagggtgcggaagccggcgccagttttgactatggcgatgcgggcgcgttaagtttttcctacatgtggactaacgaatataaagcgccgtggcataccgaaatggataagttttatcaggcggataaaaaaaccaatgtggattatctccactccatcggcgcgaagtacgacttcaaaaatgatctggtgctggaagcggcgtttggtcagtccgaaggctatgtcgatcaatatttcgcgaaggccagctataaatttgatttaggcggcaatccgttcaccaccagttaccagttctacggcgcgcgcgacaaagtagacgatcgcagcgtgaatgatatttacgacggtacggcctggctgcaggcgttgaccttcggctacaaagtcgcggaagtggttgacctgcgtctggaaggcacctgggtgaaagcggacggtcagcagggctattttctgcaacgtatgacgccaacctacgcctcttcaaacggtcgtctggatatctggtgggataaccgctccgactttaacgctaacggtgaaaaggcggttttcttcggcgcgatgtatgacctgaaaaactggaatctgccgggctgggctgtgggtgcgtcttacgtttacgcctgggatgctaaaccggcaacctggcaaagtaacccggatgcttactacgacaaaaaccgcactatcgaagagtcctcatacagtctggatgcggtttataccctgcaggaggggcgtgccaaaggcaccatgttcaaactgcactttaccgaatatgacaaccactccaatattccaagctggggcggtggttacggcaacatcttccaggatgaacgtgacgtgaaatttatcgttattgcgccattcactattttctgatgtcagatgcggcaggctgccggcctgccgcgctgttgaggaacgacctatgaaaaaaattttactcatcgccagcatgaccgccggtttgacggcctgcgcgtcatcacccgcgccggaagaagatagccggctgaaagaggcgtacagcgcctgtatcaataccgcacagggctcgcctgagaagatagaggcctgccaaagcgtgctgaatgtccttaaaaaagagcgcagacatcagcaatttgctaacgaagaaagcgtgcgggtactggactatcagcagtgcattcaggcgacgcgcacgggtaacgatcaggcggtcaaggctgactgcgataaggtctggcaggaaattcgcagtcataataacgtgcaataaaaccctgccttgccacccacgggcgaatgttttccgcccgtggttttttcaggctttattttctgccgcgatatagccgcgactcagacgtacaaacagcatcgccgtcgcggcaagtccacataacgctgcgcacatcagccaccagccgggcgagcttttatcgccggttaactttaccagcgcggtagagatggccggcgtcaggccgccaaaaatcgccgtcgccaggctaaaggccagcgagaaaccaacggtacgcacatagactggcatcacttcggttaacgccgcgaccattgcgccgttatacatgccaaaaaagaaagagaaccacagcagtaccagcgtcatgcgggtaaagtcgggcgcggcggtcagccactgcatgacgggccaggtggtgatcagcgccagcaacgtaatgcccattaacacagcgcgacggccaatccggtcggaaatcgcgccgccaatgggtaaccagataaaattggacacccccactaacatggtgacgatcaaactgtcccgcgcgctgagattaagcacggttctgccataggtcggcgtataaacggtgataaaataaaacgttgtggtggtcatcgccaccagcagcgttccggctgtaataatgcgccagtttttggcgatagttgcaaaaatttccctggtgtcggggcgatgcttgcgttgtaaaaacgcttctgtttcttgtaatgaacgacgtaaaacaaaaatcagcggaatgatcatacagccgataaagaacggaattcgccagccccactccgatatcgcgtcgtgtcccagcgtgatattcaggctataaccaatcaacgcggcaacaacgatcgcgacctgctgactggcggattgccagctggtataaaaccctttattgcctggcgttgcgatttcggacagatagaccgagacgccgcctaactcaacgcccgcagaaaatccttgtaataaccggcccaacagcaccaacgcaggcgctgccaggccgatcgtttggtagccggggacgagggcgatgagcaacgtaccgcagcccataatcgccagtgtcaccatcagccctttacggcgtccgattctgtcaatataggcgccaagcacaatcgcgccgacggggcgcattaaaaaaccggagccaaagacggcaaaggtcaacattaatgaggcaaattcgctttccgccggaaaaaacgttctggcgatataggtggcgtaaaatccgaacaagaaaaaatcaaactgttcaaggaaattgccgcttgtcacgcgcagtattgcgccgaacgtgccggcgcgcgatgttgcaggtgtgtgttgtgccatagggtttgctctccactgtctttattgttttatgggtaagatgttgcgggtcagttgcctgtatcccccgcatgttttccgcgtcgcttctcaactgcccatttgagtaaggccgcgcagcggaaaaatccgtgggcgaattttccgtagggaagggtgagaaagagcgccatcaccacgcctaaatggagcgccagcagtatgcccattccgctggtgtctctgcctgccagcagcgccagcccggtcagactggttaagaacagcagcagaataaagccgcgatccatgggtttctggcgcgcatcgccatgtaacggcgaccgccgcagattgagccacagtagcccggccgggccgataagcagaccgataccgcccagcgtgccgagcatgaccggcaggctaaaaaacgggtagggcgcttcccaaccggcgacgtagtgatagcccgtcgccacgaccgtggcggcaaaacagagcataaaaccgtaaaaggtaaagtgatgaaagcgacggcgcagcagcgtgaacgcatcgtccgcttcgttacagcctttgccgtgaccgccgtcgagatatttcagcgttaacgcattgtgcgacgcttccgcaatctctgccgaacgcggtacgcccggcgagatctcacgccagaagcggattacgcccgccataagcaaaccgattgccagcacaaaaactgagccgaacatccatgccagcaggctatgcggaaaaatttgatagaagtcaccggccagcggcggatgaatcagcgaccctttcagcgccatcgccagtaataaaaagagcgtcagaccgactatcagcgccagcgcgacggtgatccccgcccgacggtataacgcgccaaaagcggcgggctgggcatactgttgatacgtctccaggcgggcttgcgccatcgctttcggcacgttaatggcaaattcatggggcggcgcgtactggcacgcgtgcaggcaggcgccgcagttatgacataaattcgccagataatgaatatcggctttaccgaattcgagccgctgggtcatcgccggaaataccgcgcaaaaaccttcgcagtagcgacacgcgttacacacttgcatgacgcgttcgacctcggcttccggttcggtaagcacggtggcctcaatgattaatttttcaagctgtttcatgctgcgcctccttgtgcgccgcgcgggcggcttctattcccgcaatgcggccaaaggttgtgccgatagacatgcctacgcctgcggtataccccttgcccagaacatttcctgccatcatctcgccggcaacaaacaggttgcggcttggatgaccggcaaaatgcaccgcggcacgttcattgactttcagacccaggtaggtaaacgtgatgccgggtcgcagcgcataaccgtagtagggcggcgcatcaagcgggcgcgcccagtgggttttcgccggcgtcaggtttttagtggcgcagtcatcaagcaaggtatgatcaaaatgaccgggctggcaggcctggttatactgcgtgacggtatgggtaaatttttccgcgtccagccccaactggcaggccagctcagccagcgtattggcctgcgcgccaggaaaaaccggcggcataaagtggccgatggctttgctgtcaataatcgaatagccaatttgtcctggctgttgagcaaccagccgcccccaaatggcgtaacgcttcggccagaaatcttcgccttcatcataaaaacgttcggcgtcgcgattcacgacaatacccagcgatacgcaatccacgcgagtacaaataccgccgtcgtacagcggcgccctggcatcaatcgctacgcagtgcgactgggacggatcgccaatgatatccgcgccggcatccatcataaatttgagtaatacgccctggttaaaacgcgtgccgcgaatcaggaaattatccgcgggccattcgccgcgggcgttttctccccaggcctcccgcagccattcacggtttgattcgaaaccgccagccgctaatacgcaggctttggcggtaatccgttcgctacccgccagcgccgccacgaattcgccgtcatgaagttcaagcgcgtgaaccggcgtgttatagcgaacctgtacgcccagccgttcggcgctacggtaataggcattgacgagcgctttcccgccgcccataaaaaacgcattggtgcgcgcaacgtggagcgccccagatagtggcggttgaaagttaacgccatgtttgcgcatccagtcgcggcattgcgaagaggtgcgaatgaccagccgcgccagcgcctcgttggtgttgccgtcggtgactcgccacagatcctgccagaattcctcttcaggatagctttctaccagcacatcctgcggcgcatcatgcatacagcgcaggtttcgtgtgtgctgagaatttccgccgcgccattcccgcggggcagcctccagcagcagaaccgatgcgcccgcttcccgtgcggtcagggcggcgcataatgcggcattgcctccgcctatcaccagtacatcaaccatcttatactcccgtaccatttaactatttgttaaatttgtaattgaaatgtatacggataaataagcggtgcgctatcaggtagcgctaaacaggggtttagtaagcgtaaagggttgcgcctggccattcaccggcgtcgactaactgacgcataactttggtaaggactactctggcggcaaggccggcgggcgtcagttcatcatccgacaggctgactaaaaaattggggcggctgagtaccggattatggacgccgatcacgcgtagcgcgtcgttatccagatgagaaatcgccgcgccgggctgcaacgtggcgccaagaccgtcgcgcacggcgcgcatcaacaacgccaggccgtcaatttccgcgacgatttcaacgttaagcgcatgttcctggcagacagcgtccagcctgccgcgcagctcatgtccctggcttggcataatgagcggaatgcctgccagttgttcaggtgtgatcgggttatcaggaagcgccgccagcagggcatgggagccaatcagaaaaagctgttcttcaaggatcggtctggcgctccagcgcaggattttatctttttgaaagacaatggctaaatcaatctggcgggtattgatcattctttccagattaccggacaagctttccaccacatgcagtcggacatcggcatagttttcctgcatggcatggataaacggtatacccagtatggaggcggtactgggggccattcctacgctcacatgaccggaaaggcgcgcttctctggcggcgagaatcgcgtcgtcggcatgacgcagggcgagttgcgcctgtgaataaaaggccagcccggcgttggttggcgttacgccgcgcgaagtgcgctgcagcagacggatggcgagctcgttttccagacgggacatctgttgacttaatgctgaaacgccaatatcaagatcctgtgcggcgctgcccatactgccggtttcaataatacgcacgaaatagcgtaactggcgaagctccattcctgctctcctgagatgcgatagcgttttttacattaaatcaacatcaagcggcaggaaagaggaggatataaaaaagccaaccgggcggttggctcttcgaaagatttacacttatttagtcgcgtcatcgtgcgcgtgctcgtcttcgcggcagtcgccttcagcgcagtggccgtaaagatagaggctgtgattagttaaacgaataccgtgtttcgccgcaatttcacgctggcgcgcttcaatagagtcatcactaaattcaatcacttttccgcaatcaaggcagataagatggtcgtgatgatgctgttgcgtcagttcaaaaacggatttaccgccttcaaaattatggcgggtcacgataccggcatcgtcaaactggttcagcacacggtatacggttgccagaccgatttcttcacccatgtcgatcaggcgtttgtataaatcttccgcactgacgtgatggttatctggttcctgaagaacttccagaatttttaaacgaggaagcgttactttcaggccagccttctttaatgcggtattgttgtcagtcatgcggaatctgtcctgttgctaaacgattcacttcattagagaagtgacagaaattgcactcaagataatgcgtatcattataggactgccatgccgaaatgaaaaccgcaagtctctcgcagatgttaataaaactgtggttttgcctgcaaattctggcgccacctgattacacccggacattgtacagggatgggtgcgaaagttacaaatttgtagcaattattttgattggtcttgtctattgatgcggcgcagatataacgctgcgccgcataagattaggcgttgaggatgtcgtcgaggtgcaattcagccgaaacttgcttaacccatttttcaacacgctcggcggtcagttcaggctgacggtcttcgtcaatcgccagaccgacaaaatgatcgtcgtcagccagacctttagaggcttcaaaatgatagcctgcggttggccagtgacccacaatcgtggcgccgcgcggctcaataatgtcgcgaatcgtgcccagcgcatcacagaagtattccgcgtagtcttcctgatcgccacagccaaacagcgccaccagcttaccgttaaagtcaatctcttcgagagtcgggaagaagtcatcccagtcacattgcgcttcgccataataccaggttgggatgcccagcagcagaatgtcatacccttccaggtcttctttactgctttttgcaatgtcatgcacatcggcaacgtctttaccaagctgtttttgaatcatttttgcgatattttcggtattaccggtgtcgctgccgaaaaagatgccagtgattgccatgagtaaaataacctcttgaaacttattgaaatggtggtggcgaattgcccacggataagggcaatcatagcagaacaggcagatatgcggaaacagcaatcacgcgggactgcacgctctgctacacgaaatatgaaacaaaacttattttcagactaaaccctagccgcgcagcgccataagctgcttcattaatatttcttcaatgagctcgctgcggctaatgttgcgcgcttcggccagctcattcagcgcgtcaaccgcttgtgcgttgagttttaattcgacacgcttgaggccacgaactttgtcgcgttttaactggttgcgcttgttgatgcgtaactgttcatcgcgcgaaagcggattcgttttaggtcgtcccgggcgacgctcgtgcgcgaacagatctaatgtcgtacggtccgtttgttctttggccatgattttggtgacttcgggggaaacaatcagccaggcttatgcccggatggatagcgcgccatcatacatcagcgaggaagcgacgccaacgcccgcgcgcgtaatcgcgcacaggcgatgagtttttaatcagttagcgtttatcgtgcagataacggcggatggcgcgcagaaccgcctctggtttttcggcatgtacccagtggcccgcgccggcgatcacatgcgcgcgcgccaaagggaattgtgccagtagcgtgtcgcggtacgcttcggtcacgtacggcgagttaccgcctggaataaacagcgccggatgttcccagggcggaatggtttcccagccgacgatatgcggatactgctcccataataccggaacattaaaacgccattcgccttcagcccaggattttaacagaaactggatcacgccttcttcgttgaggtgctggcgcataatccctgccgcctgttggcgggatgtcgcgtcggattcgctgacggcgttaatggccgcgaaaatgcgatcgtggcggcgaacgtgataatccacgggggcgatatcaatcgcgaccagacgatcgatgcgatcgggcgccagcgccgtcagcgccattaccgcttttccacccatggaatgaccaataaacgtcgctttttcaatctgctgcgcgtcaagcgtatccagaagatcctgggccattgccggataatccatgaccggatcgcgcggcgataaaccatgattgcgcatatcgacctgaataatgtcgtgatcggtcaccagatcgcgcgccagtacgccgaggttgtccaggctgccaaacaggccatgaacgagaacgatgggggaattattgtgcaggttttgtgcagattgcgctcggatgtttaatttcatggcaaagttctttttttcgctctgtcgggttagggtattatgttgaccattctgccactgggctgcaacctctaaggtttactccgagtttttttgtcagccgggcttaacgctatccgctgttgggatttgttcctataatcccaatgacttgtattcagcaaagacatcgcactggattaagatgaaaacgattgaagttgatgatgaactctatagctatattgccagccacaccaagcatatcggcgagagcgcatccgacattttacggcgtatgttgaagttttccgccacgacacagccaacggcttcagcggtgaaggggacgcctgcggcgcaacccgttgccgaagcgaaaccggttaacccggtaaaagacaaagttcgcgcgatgcgtgagctgttgttgtctgacgaatatgccgagcagaaaaaagcggtcaaccgctttatgctgattctgactacactctattcactggatcaccacgcgtttgcggaggcgacggagtcgttgcatggccgcacgcgcgtctattttgcggcggatgaacaaacgctgctgaaaaatgggaatcaaactaaacctaagcacgttcccggcacgccgtactgggtgatcaccaacaccaacaccggccgtaaatgcagcatgatcgaacacatcatgcagtcaatgcaattcccggcggaattgattgaaaaggtttgcggaacaatttaatccttgcattagaaggaccaggcaatggcaatccacaaccgcgcaggacaacccgcgcaacagagtgatttgattaacgtcgcccaactgacggcgcagtattatgtactgaaaccggaggcagggaatgcagaacatgccgtgaaatttggcacttccggccatcgcggcagcgcaggtcgtcacagtttcaacgaaccgcatattctggcgatcgcccaggcgattgctgaagagcgggcgaaaaatggcattaccggcccctgctatgtggggaaagacacccatgcgctctcggaaccggccttcatttccgtgctggaagtgctggcggcaaacggcgtagacgttatcgtgcaggaaaataatggctttacgccaacgcctgccgtgtcaaatgctatcctggtccataacaaaaaaggcggcccgctggctgatggtattgtcattacgccgtcgcacaacccgccggaagatggcggtattaaatataatccgcccaatggcggcccggcggataccaacgtcactaaagtggtagaagatcgcgccaatgcgctgctggcgggcggcctgcaaggcgttaagcgcatctctctggatgcggcaatggcctcgggccacgttaaagcggtagatctggtacagccgtttgtcgaagggctggcggatatcgttgatatggcggcgattcagaaagccggtctgacgctgggtgtcgatccgctgggcggctccggtattgaatactggaaacgtatcgctgagcattacaaacttaacctgacgttagttaacgatcaggttgatcaaaccttccgctttatgcaccttgataaagacggcgcgatccgtatggattgctcctccgaatgtgcgatggcgggtttgctggcgctgcgtgacaagtttgacctggccttcgccaacgacccggactacgaccgtcatggcatcgtgacgcctgcagggctgatgaacccgaaccattatctggcggtcgccattaactatctgttccagcatcgtccgctatggggcaaagacgtggctgtcggtaaaacgctggtctcttccgcgatgattgaccgcgtggtgaatgatttgggacgcaagctggtagaagtgccggttggcttcaaatggtttgttgacggtttgttcgacggcagctttggtttcggcggggaagagagcgcgggcgcttcgttcctgcgtttcgacggtacgccgtggtctaccgataaagacggtatcatcatgtgcctgctggcggcggaaatcaccgccgttaccgggaaaaacccgcaagagcattacaatgaactggcagcgcgttttggcgccccgagctataaccgtctgcaggcgagcgcgacctccgcgcagaaagcggcattgtctaaactgtctccggaaatggtgagcgccagcacgctggcaggcgacccgatcaccgcgcgtcttaccgcagcgccgggtaatggcgcatcgattggcggcctgaaggtaatgaccgataacggctggttcgccgcgcgtccatccggtacggaagacgcttacaagatctattgcgaaagcttcctgggggaagaacatcgcaagcagattgagaaagaagccgttgaaatcgttagcgaagtattgaaaaacgcctgatgggcgatatggaagaaaaaggagccttacggctccttttttgtattaacggcgctgcgcttatcaggcctgtaaaccgcctccaggccggataaggcgcttgtgatatctgacttattcgctctgagtcgccagatgtcggcggcaggtgagggcgtcgcattcgatacgcaccacgcaaaccgctttcatcatatcttcccgataactgaaggtttttcccggatcggtctgacgcataatgacgtccaggccgtagcgcatctcctcgcgcgtttgcaatatcgatgccagtccggtggcgaaaacgctggtgtaggcgtagctataatcacaggggtcatcggcacgtagtaatgcatggtcgccgtccatttcaatgcatactgccgggttcttacgtaacagacgcatctttttcccggtgcgtgcgccgtgaaaataaaatatccagcgtccgttctgatactcgtagccaaaatttacggggacaacatacgggcagagattgtcgttaaaccctatccgacacacttcgtgtttactgagaatagccagtatttctgctatatcagtgacttcccgctctggattactcatttctattatcttattcaaagagtgaaaatgcccggactaccgttaccgcagcccgggcgcgccatcagccgtgtttatttttcaattcaaaacgcggtgagaccaggccgtataacgtccagccgaggaaggtcacaattgagccgtacagcatggcttcttcaccggaggaatagagcgcgtagaagctatacatggcgccaacgaaggccacgaagttagcgactttcgcttttgatgacggcacattcgccattttctgaatgataaccagcgcggccatcgacagaatatacggaataatgttcgtcaccaccgccaggttaaccaggacgttaaactgactattcagcgacgggctaatggtcatcagcgacaggccagtctgaataatcacaatgatcaacatcccctgaaccggcgcgtcgactttcgttacacgagagaagactttcgggaaatagccttcgtcagcggaggatttaaagacctgagcgatagtgaactgccagcccagcagcgagccgcagcaggacattaccatcagcgccatgatcactttacctaccgcaggcgtgaacatctgtgcaaacgccagaccaaacggcgccgtggagttcgccagatccatgttcggcacaatcccggcaatcacgttagtcgaaacgatatagatgaccgccgcgcccagcgtaccgcccagtaccgcaatggggacgttcttttccggattctcgaccacgtctgcgttggcgcaggcggattccagtccaagaaatgcccataacgtcatggcgatggaagaaccgaccgcgctaaagaacggaacatggtgcgggttccatgacgctacgtacatgctggggctaaaccagaaccagccaatgatgcacaggccgacaaccggaatgatgacgccccaaacggtaacgctactgatctgtccggtaatacgcgcgccgccaaagtttgcgatggtacaaacccacaatacggcgatagtcgccagaccgatctggagcggcgtcagcgcggcgccgaacagttcggtaccatagccgacagcggagatggcgatagccacgttggcgatcagcagcgagacgccgtaggtatagttcgccataaagttgccggatttaccgaaggcatattcggcgtaaccgcccatgccgccggatttacggctaaacataccgcatttcgcaaacgcccaggccagtgccatcgagccgacggcggtgaccagccaggagataatggatatcgtgccgacttcagacagtttggtcggtagcatgatgatcccggagcccatcatgttgaccatagtcagaattgtgagctgcacgacacccattttattggatttaggtttactcataatttttcctccttcagcagggagcgctgtgcgtcacgaggtttaatgacgtagcaccagacctgcttacggccgtcgtgttcttcgatataaacgccctgcagttcaggcgcaaagcccggcagcaggttgatcccttcttccagggcgctgaagtaacgcaggacagaaccgccccagatttcacccggaactacacacagcactcccggcgggtaaggcagagcgccttcagccgcgatacgaccttccgcttccggcaggcgaaccagttcgacctcgccgcgcagataggcatagttggcctcttgcggattcatactgactttcgggaaatgcgatttacggaacatctctttttgcagctgtttcacgttgtgccgcgcatagagatcgtgcatctcctggcaaagctgacgcagggtatagccggcataacgcgcttcatgctgtttgtagatggacggtaatacttccgctaacggcgcatcagcttccagcagtttttcgaaacgagccagcagggcgacaagctgttgtaacttcgccatgtcttctgccggcgtcagcaggaacagaatggagttgaggtcgcatttttccggcacaacgccgttctcgcgcaggaagttggcgaggatcgtggcaggaacgccaaagtcttcatattcgccgctcgctgcattaatgcccggtgtggtgagcagcagtttgcaagggtcgacaaagtactgatgttcggcatagccttcaaacgcatgccagtgttctcccggaacgaagtggaagaagcgcagatcgctggcgatctctgacgtcgggtatgactgccacggcttaccatcaatcagttccggtacgaacggacggatgtgatgacagttttcgaggatcaatttacgggcatcgatgccgttaaccacgcaatccatccacatattgcgaccgctgacgccttcgtgcattttggcgttaacgtccagcgcggcgaacagcggatagaacgggctggtggaggcgtgcatcataaaggcgttgttcatgcgcttatgcggaacgtagcgcgattgccctttgatatggctatcttttttatggatctgcgaggtctgggagaaaccggcttgttgtttgtgaacggactgcgtcaccagaatacccggatcgttttcgttcagttccagcagcagcggcgaacaatcggccatcatcggaataaattgttcatagccgacccaggcggagtcaaacaggatgtagtcgcacagatgaccaattttatcgacgacctgacgggcgttataaatggtaccgtcgtaggtgcctaactggatgacggccagacggaatggacgtgcttcgcgggcacgctgcggcgcgacttcgctaatcagctcgcgcaggtaatcttcttcgaagcagtgagcgtcgatcccgccgataaaaccatacgggttacgcgcggtttccagataaactggcgttgcgcccgcctgcaataatgcgccgtggtggttagatttgtggttgttacggtcaaacagtaccagatcgcccggcgttaacagcgcgttgagtacgactttgttagaggaggaggtcccgttcagcacaaagtaggtcttatcggcgttaaagactttcgccgcatgttgctgcgcaatgcaaggcgcgccttcgtgaatcagcagatcgcccatcgccacgtccgcgttgcataggtcggagcggaagagcgtttcgccaaagtattccacgaactgattaccggcaggatgacggcggaagaattcgccgccctgatgccccgggcagtcaaatgcgctgttgccctggttgacataatccaccagcgcgcggaaaaacggcggacgtaactgcgtttcgtagtggcttgctgcggtttccaactggcgaccatagaaggcagtacgggattcattatattcgaatacaccagagatacgcggcaaatactcaggcggtacgcgcccttcgtcatgtgtcgcgacaaacacgggaataccgtaacccgttgcgtcgatttcatcgagttttccgtgttcaatgtcgtcaatggataacacgatggcagccacgtcgatgaaacgactctcatcaacatttacaatattacggtgtgtagaaaaacaatccgggcaatgacggctaacggcaatttttaattctgacatttttcatctctttatttcaggtaatagcaggccctcaatttctcgcatgagaaactgattcttccggaaaaaatcaaagctatcccgctgataaaaaaatcagtaaattagctttattttagatgtaataaatcccaacccgtccggttgcaggaaattcaggatttaaggagttgagtactacgatatacaggcagaaaccgcgataactaaaattgcgctgagtcggaatttcttctgtcaaaccacatggttagctggctgggcgtaaaggaattaccgtactgtcgcttttaacaattcgagttatttaggcaatagacctgaatgacataagggtcggaaagacctgtatgctgaagtacccgtagcagaaaaactaccgggcattaaagaaatgaaagtcgaaactattgcggtgggcaaacatcataatatgcgttgtccgccttatatggggcataaaacgattattattttccattttgaggtcctttcattgatttattgaaagcatggatattttatccaggaagcgccagcaatctgtgaaccagatcaacaaaaaacgatcatttgaaaaataattagtcggcgattatgcatatcgtgctgtgaaataacggattgtttcttaaatgttaattatatgttttttatatcctctataaaatataatatcgccgcgaaaataattattcgcgacgccgaaaataaatgacataaaaattagaagttatttaaaaataatgaatagctattcacggcataaagcgatagccaattccggtttcggtaataaaatggcgtgggcgggtgggatcttgttccagtttctggcgtaaatgtcccatatagatgcgcaaatagtggctatgctccacggcgttaggcccccagacctggtttaataactgccgttgggttaatactttgccggtattattgagtaataccgccagcaggcggaactcaatcggcgtcagatggatttcttcgtcgccacggtggatcaaccgtgcggcgagatcgaccgtcacgccggaaaagcggacgatcggatcggcgcaagggctggcggcgtgccgtcgcagcgcgacacgcaaacgcgcctgcagctcgccaatgccgaatggcttgctcaggtaatcatcagctccggcgtcaagcgcggcaatcttatcgctttcttcgctgcgggcggaaaggacaatcaccggtattgcgctccattgacgcaggtcgcgaataaaatcgattccgtcgccgtccggcaggccgagatcgagaataatcagatcgggctttcgcgtggcggcttccagtaaaccacgttgtaatgtttcagcttcatacacgcgcaggccgtcgccttccagcgcggcgcgcagaaagcggcggatggcctgttcatcttcaacaatcagaacgtttgtcacatatcctcatgaaaatcatcaagttcaggtggctttccttgcggcagcgtcacacggaaacaggcgccgccctgcggtcgattataggcggtaagcgtgccgccgtgtacctctacgatagcatggcaaatcgccagccccagccccacgccggggacggcggactctttgttgccgcgggcgaacttatcgaaaatcttctgttcttgccccgcaggaatacccggcccgttatcccagacatccagttgtaaacgatcgtccttaaccgcagcatcaatgccgatactggcctgcggcccggcgtacttaacggcgttttccagcaagttgatcaggacgcgctcaaataaggggccatcgacatggataagcgttaactgttgcggcagcgacaatgtaatcggatgcaataaacccggctctaacatctgtaacgcgctaccgacgacctcttccagcgtcagccactcttttttaagattaaacccgccggactgaatacgcgccatatccagcaaattattcaccagccgggtggtgttgagaatatgctggcggatttcactggcctgacgcgcgtggggcgatcctgcgctggctaaatccagcgtcaaaatttccgcctggccgaacaataccgtcagcggcgtgcgtaaatcatgcgacagcgccgccagcagagcgttgcgaatactttcgcgctcgctggcgagacgcgcctgttcttcgctggcggtcagcgtcagtcgttccagcgcgttggcgacaagcagagtaaatgtttccagcaggcgttgctgctctggcaccattaactgacgcaaattacccggttcgacgatagccagaccgtacgttttatcggcgcttttcagcggcaggatttgataaggcacgccagggagggtatcggtgcctgcgccggcaggctggcctttatcaaaactccagcgcgcaattgcgtcgtcccacggcgtcatgccttgctggtgggtgagaggcagcaacttaccgttagcatcaggtaacaaaatttggctgcgcgcctggaacgtcgaggcgataaaccgctcgctggtcgcggcgatatcatgttcgctacgcccgacggccagcgctttagacatttcatataaatggcgggtacgctgttcccgataacgggcgacgcgcgcctgatagcgcaccccggcagtaagattgccaatcaccagaccaaccgtcagcatcacggcaaaggtcagcaaatactgcacgtccgaaacggcgagcgtaccgcgtggcgcgataaaaaagagatcgaaactcgccacgttaatcaccgtcgccaccaccgacggccagcgtccgtaaagcagcgcaatcaccactacgcccagcaaatagagcattaccagattggcggcgtcgaaggtgacaagccactgcatagcgataagcgtggtgatggcgcaaagcgccacggcgaccagacagccctgaatctgcccacgccatttctctttaaaaggtcggttatcaggcgtttgcgccaatgcgcgggctggcggctcttccagcgcgacgatcacctgatcgagatccggcgcgcgcctggcaagacggtcggcgaaagcgtcacgtcgccaccagcgtcgcgacgccgggcggcccatgacgattttccccagattatgctcgcgggcatagcgcacgaccgctttctcttcggcgggatcggacagggtggcggtttccgcgccaagctcctgcgccaggcgcagcgcgcttaaaatagcccgccgttgcttttccggtaagcggtgtaacgttggcgtttcgacatagacggcgtgccagacgctgccaagccgggaggccagacgcgccgcggtacgcaccagtttttcgctgccggtgttatgcccgatacacagcaaaatcgcatcgcgggtatgccatactttttcttcgcccggatgcgcgcgccaggcgcgcatctgatcgtccacgcgatcggctgtccggcgtaacgccagctcgcggagggcgatcagattgcccttgcggaaaaaatgttcaatagcgcgttccgcctggccggcgatatacactttaccttcgttgagccgttggcgcagatcgtcgggcggcagatcgaccagtacgacttcatcagcggcatcaaaaaagggatcggggacggtttcgcgcacctgaattcccgtgacgccgctcaccacatcattcagactttccagatgttgtacgttcacggtggtgaaaacgtcgattcccgcttccagcagctcttcaatatcctgccagcgcttaggatggcgtgagccaggcgcgttactgtgcgccagctcatccattaaaatcagcgccggacgccgggcgagggcggcatccaggtcaaattcgcggatttgccgcccccggtgcgagtgacgttttggcggcagaatggtcagcccgtcaagtagtgcggcggtctctttacggccatgcgtctctaccacgccgatcaccacatccagcccctgcgctcgcagccgctgcgcttgcgccagcatcgcccaggtttttccgacacctgcgcaggcgccgaagaaaattttcaacttcccccggtggggcgggggcgtttgttccaacaagcgatccggatcaggacgcaagggttcgtcgttcatttcgctctgtgtccctgtagcgcatccagcgccagattaagctcaacaatattcaccaccggttgcccaagaaagcgcgccagcggcctgtgcgtatattctgcaaccagttgcgcgacctgttcaacgggaagctggcgagccgccgctacgcgggggatttgccatgccgcggcgccgggcgtcagattattatccagcccgcttgccgaggccgtcgccagctcaaccggaaccgcggaactcgcctgggggttagcggcgcgtagcgcggcgacgcgggcctgtatttgcgcatccagttcgggattgctggcggccaggttgcttccgcccgacgccagtggattataaggcgtatcggcggtggcggagggccggccatgaaaatagcccgcggcggtaaacgattgtccgataagcgctgagccgcgtatcacattgtctttatgaatcagcgagccattagcctgccagggaaaccaccactgccccagcgccgtggtcagaagcggatacacgccgccagtcaataacagcagaaataacattgtcgaaaaagcaggacgtaaaccgatcatcatacacctcacgccagacccagcagggtcagcagcacatcaatcactttgataccaataaacggcaccaccagaccacccagaccatagatccataaattacggcgcagcatggccgatgcggaaagcggcttataactcacgccttttaatgccagcgggatcagaaaaataataatcagggcgttaaagatcaccgcgctcagaatggcggagttcggcgaatgcagccccatcacgttgagcgcgtttagctgcggataggtagcggcaaacgcggcgggaataatggcgaaatatttcgctacatcattcgcgatactgaaggtggtgagcgagccgcgcgtcatcagcatctgcttaccgatatgcaccacttcaatcaacttggtcgggttagagtccagatccaccatattaccggcttctttcgccgcctgggtgccggagttcatcgccaccgcgacgtcagcctgcgccagcgccggggcatcgttagtgccgtcgccggtcatggcgaccagccgtccttccgcctgatattgacggatcagcgccagcttggcttccggcgtggcttcggcaagaaaatcgtccacaccggcttcggcggcaatcgctgccgccgtcaggcggttatcgccagtgatcatcaccgttttaatacccatctttcgcagctgggcgaaacgttctttaataccgcctttaacgatatccttgagggcgataacacccagtacgtgcgcgccctccacgaccaccagcggcgtcgcgcccaggcgcgccacgttctcgacgttttgctcgacatcggcgggaaaatggccgccattgctctcgacatgacgccgaatcgcgtccaccgagcctttacggatcatccggttatcgatattaatcccgctcatgcggctttgtgcggtaaacggagcaaaggtggcatgaagcgactgcacatcgcgttcacgcaggttaaagcgctgtttggcgaggatcacaatgctgcgaccttccggcgtttcgtcggccagcgaagcgagctgcgcggcgtcagccagcgtgcgttcgtccacccctcgggcgggaataaaatcggacgcctggcggttgccgagcgtgatagtgccggttttatccagcagcagcacgtcgacatcgcccgcggcttctacggcgcggccgctggtggcgatgacgttcgcgcccaacattcggctcattccggctacgccaatggcggagagtagcccgccgatggtggtggggatcaggcacaccagcaacgccaccaacacggtgacgctgaccgcgttaccgccccaggcggagaagggccacagggtggcggtcgccaataaaaagacaatggtcagggcgatgagcaaaatcgtcagggcaatctcgttaggcgttttccgccgctgcgcgccttccaccatcgcgatcatccggtcaagaaaggtttcgccaggattgacgctacaggcaatcaccagccagtcggaaagaattcgcgtgccgccggtgacagaggcgaaatcgccgccggactcgcggatcacgggcgcggattcgccggtaatcgcactttcatccaccgaggcgccgccttcgatgacctcgccgtcgcagggaataatatcgcccgctttgaccaggacaatgtcgcctttccgcagttcagcggcgggcacgttatcggcctgcgcatcatggcgaggggcgcgcaggcggcgagcgaacgcggtctttttcacccctttcagactgtttgcctgggctttgctgcggccttccgccagcgcttcggcaaaattggcgaacagtacggtgaaccataaccacaggctgataatccctgtaaacaaggcgcttcccgctatttgtcctgttaccatagcgagcgttaacagagtggttagcacgctgccggcccagaccacaaacatcaccgggttacgccactgggcgcgtgggcttaatttttttacggcatccgttagcgcctgtacgagtaaaacaggttcaaacagcgccagttgcttgcgactcatatcaatgtactccacatcgctcaaggtaaagagaaatgctccgctaccgggccaagcgccagggcaggaataaatgtcagcgcgccgaccagcagtaccgtgccgatgagcagtccaataaatagcgcgccgtgggtcgccagcgttccctgactggccggctgtacttttttactgaccagcgagccggcgatggccatgacaggaataatcacgccgaaacgtccgacgaacatgcagaatgccagcaaacagttccagaaaggcgagttagcgctcagacccgcaaaggcgctaccgttgttgttggcggcagaggagacggcatatagcacttcgctaaaaccgtgcgggccagggttcagcattgcgctgcgtccggcatccgtcatcatcgccagcgccgaacccaacaagaccagcatcggcgtgaccagaatcgccagcgcggtcattttcatttcgcgcacgtcgatttttttccccagatattccggcgtgcgaccgatcatcagccccgcgataaacaccgccagcaggacaaacagcaacatgccatacaggcctgaaccgacgccgccaaagaccacttcgccaatttgcatcagccacatcggcaccataccgcccagagcggtaaacgagtcgtgcatggcatttaccgccccgcaggacgccgcggtcgtgacgacggcaaacaggctgctggccagcacgccaaagcgtgtttctttaccctccatgttgacgctactgtccgcgcctgccgccaacagatgtggatttccctgaacttccgcccacatcactaccgctacgcagaccacaaaaatgaatgacattgcccacagtagcgcgcgtccctgacggcgatcgcccgccgcttcgccaaaggcgaaacagagcgcggctggaatcaaaaatatcgccagcatctgcgccagattagtgagcgcggtggggttttcgaacggatgcgaagagttggcgttaaagaaaccgccgccgttggtgccaagcattttgatcgcctcctgcgaagcaaccggccccatcggcaagagttgtttagcgccttcaagggtggtgatgggctgataagccgacaggttttgcggtacgccttgttggataaaaaacagcgcgataattaacgcgacaggaaataatatccatagcgtaatgcgtaccagatcctgccaggcattacccagcgtgtgcacattctggcgcgtaaaggcgcggataagcgcaaaaaccaccgcaatcccggtcgccgccgacaggaaattttgcaccgtcagcccggccatctggctaaagtagctcagcgtgctttcgccgctgtaggcttgccagttggtattggtgacaaagctgacggcggtattcagcgccagatccccggacagccccggtagccgctgcggatttaagggcagccactcctgccagaacaacaggcaaaacaggatgcccagtcccagcagattgagcgtcagtagcgccagtaaatactgacgccagttcatttcgtggtcggtaatgccaagagtccgccagaggatacgctcaatgccagccacgcccggcaacggaacggcggcgatgagccttgccaggcccgaacccaatggtttcgccagtaccaataaaatcagtaaaaaactggcgatcagtaaaaatccttgcgcggccatcagaacgcctccgcattaatcagggcatagaccagataacctaaaagtaagaaaaccagcacgatgccggttatcacgcctgcactcacagagcacctccagtggcattgttttactcctgagaaaggtaattttttggctgcaaagatttcgcaaaaattggcgggcggagtgtaaaaaaagtataaaaatggcaaagaccattatttaactaatgattagtattaatttaacctttttgtaactaatttacgctttgaatgtaaatctgctggaaaagcgtgaaaataagtggtcggatgagtagtaaaattacaccgaaagcggtactattttaatcaggtaacgaggttcaatttttcggtgctattcaccgattcaatctataccggggcgggtagcgtcggtataaaggggggaaacgtatggaacactataaagactatccagcgcatgtcatttttgtccgtcgtgctttcgcggtgatcgcaggcgtgctggcgctgccggtgatgctcttctggaaagaccgcgcgcgtttttatagttatctgcaccgtgtctggtcgaaaaccagtgataaaccggtatggatggcgcaggctgaaaaagccacctgcgacttttattaatcgcgaccagcctgaaaaaccgtcagccgccacgctggcggtttttttatgcgccagggtctacactgtttaacgctattcgccgtgacgtttcatctttcaggagttgtatgcccacccatttagtctggttcaggcgcgatctgcgtttacaggataaccttgcgctggccgccgcctgccgcgatgcatccgcgcgggtgctggcgctttatatttccacccccgcgcagtggcaggcccatgatatggcgccgcggcaggcggcattcatcagcgcgcagctcaatgcgctacagacggcccttgcagagaaaggcattccgttgctgtttcatgaagtggcggattttaacgccagtattgaaacggtcaaaaacgtttgccgacagcatgacgtcagccatctgttttataactatcagtatgagtttaacgagcgtcagcgtgatgcggcggtggaaaaaacgctgccctctgtcatctgcgaaggctttgacgatagcgtgattctggcgcccggcgcggtgatgaccggcaatcatgaaatgtataaagtttttacgccgtttaaaaatgcctggttgaaacggctaaaagaagatatcccgccgtgcgttccggccccgaagatccgggtgagcggcgcgctttctacacccttaacgccagtctcgcttaactacccgcaacaggcgtttgacgccgcgcttttcccggtggaagaaaacgcggtcatcgcgcagctacgtcagttttgcgcgcagggcgcagacgagtatgcgttacggcgcgatttccctgcggttgacggcaccagtcggctttccgccagcctggcgacgggcggcctgtcgccgcgacagtgcctgcaccgattactggcggagcagccgcaggcgctggacggcgggccgggaagcgtctggttgaatgagctcatctggcgggaattttaccgtcatttaatgacctggtatccggcattatgcaaacaccagccgtttatccgctggacaaaacgcgtcgcgtggcaggaaaacccgcactattttcaggcatggcagaaaggcgaaaccggttatcccattgtcgatgcggcgatgcgccagcttaacgcgacgggctggatgcataaccgtttacgcatgattaccgccagctttctggtaaaagatctgttgattgactggcggttgggggagcgctatttcatgtcgcagcttattgacggcgatcttgccgccaataatggcggctggcagtgggccgcctcaaccggtactgacgccgcgccttattttcgtatttttaatcccacgactcagggagagaggttcgatcgcgacggcgaatttatccgccagtggctaccggcattacgcgatatccctggaaaagcgattcacgagccgtggcggtgggcggaaaaagcgggagtcgtgcttgattatcctcggcctattgtggagcacaaacaggcgagaatcgcaacgctttccgcctatgaggcggcgagaaaaggggcgtgatacaggcccggtagcgcaaactaccgggcattctgctatcaggattcgacggccagcgcgcggcttttgaatttgaaggactgatacagccaaatcagcaggacaacccctacgcaggctaacgcgccccaggtgatctgttcaaaaacatccacataggcgttgatggcgtaattaaccgcgccgctggcgtcgaaggcgctttgcgaggtctggtcagcgatgacgcctgccagatagttagctatcgcgccggacagcagcatataaattccggttaatacgccggtgacgccggggatatcaatgcgcgtaatttgcgacatggcgaccgggtcgataaatagctcggcaaagcccatcaccgccagtcccagcaccattagcggcattgaagagtgtccgtaagcggcggaccagcgtgcgctcagggtcagaatacagaatccggcgctcatcagaccgagacccagcgcgaatttgccccagatacgcacggtgcgattaccgcttacgctctctttaaccagccaggccaggacgaccccacacagcatcacggcaaaggcgttcaccgactggaacatggcggtaggaacggaatagcccagaatatcgcggttcacaaagcggtcgatatacaggctgatagaactgccgccctgctgggcaaacgcccagaacagcatactgaacagggtcagggtgacaatcagccccagttctttgcgctgtttggccgtttgcgcctggcgataaattttttccagcacgaccaggccgatcgcggtcgccacgattaaggcatagacagaccattctttccagaacagaacggtaatcagcaacggcgccgctaccagcaaaattaacagccagccccagttcggcagcaggtagtttctggcgcacaacacggctttattcacgccggtggtgtgggtgaaatgacgatttccacacaggaagatcactaaccccgcaagcataccaatggcggcgagcgcaaagcccatcgcccaactgtactcctcttgcacatagccgcaggcgataggcgccacgatcgaaccaatattgcccgctgcgtaaagcagcgagaacccgccgtcgcggcgcggatcttccggctggtacagttcgcccagcaggcagctaatattcgatttaaacaggccgtagccgcagacaatgatcgccagcgacagataaaggaatgtcggcgcgatctcactggcgcccagcactaaatgacctatagccattaaaaatgcgcccagcatgactgccattcggttgccaagcaccttatccgccagatagccgccaagaatcggcgttacgtagaccagcgaacaataagcgctgaataactcataggcgtggttatcgtcgtattttagctgattggtgagataaagaatcagtagggcgcgcataccataaaagctgaagtactcccaaatttgcagggcgacaacgtagtaaatagcgcggggttgagatgcttgtttattcatcgtatttccgggatagaggcactgcggcaagaacgcggcattctcagataatgcctttctttgtgggcttattaagcctgccgtatcgccgtgtttccttaaagttaccaacatgatacagaactgattttttctgcaatatgcgttctgattgcataaatatacatgaaaccgatcgtgttttgctaagtaatttgcgccaaacccggaggtgattgtttcttgatgtgtcaaacaaatgtttatcgacgaacggctaacggaaggctatgttaacggagactgaacccgtaacgggaaagtagaacgtgggttaaagggagcgatgatgaaaaacaccgagctggaacaactgattaacgacaagctgaacagtgcggcaataagcgattatgcgccgaatggtttacaggtcgaaggaaaagagacggtacagaaaatcgttaccggcgtgaccgcaagtcaggcgctgctcgatgaggcggtgcgtttgcaggccgatgcggtcattgttcatcatggttacttctggaaaggcgagtctccggttattcgcggcatgaaacgccgtcgcttaaaaacgttactggcaaatgatattaacctttacggttggcatctgccgctggatgcgcaccctgagctgggcaacaatgcgcagttggcggcgctattgggcattaccgtgaaaggagaaattgagccgctggtgccgtggggagagctctcaatgccggtgccagggctggaactggcctcatggattgaagcgcgtctggggcgtaaaccgctatggtgcggcgataccgggccagagaatgtgcagcgtgtcgcctggtgtaccggcggcgggcaaagttttattgatagcgccgcccgcttcggcgtggatgctttcattaccggcgaggtgtctgaacagaccattcattccgcgcgcgaacaggggctgcatttttatgccgccgggcaccatgccactgaacgcggcggtattcgcgccctgagcgaatggttgaacgaaaacacggcgttggatgtgacgtttattgatatccctaacccggcataactgagaggcaataaagtgcagcgagcgcgttgttatctgttaggcgaaacggcggtcgtcctggaacttgaaccgccgattacgctggcgagccagaaacgcatctggcgtctgacgcagcgtctggtcgatatgccgaacgtggtggaagccattcccgggatgaacaatatcaccgtgatcttgcgggaaccgcaaaccctggcgctggatgcgattgagcgtctgcagcgctggtgggaagagagcgaggcgctggaaccggactcgcgttcggttgagatcccggtgatctatggcggcgcaggcgggccggatctggcggcggtggcacggcacagcggtttgagtgaaaagcaggtcgtggagctacatgcctccgttgagtatgtcgtctggtttttaggctttcagcctggctttccctatcttgggaatttaccagaaccgctccatatgcccagacgcgcggagccgcgcctgcaggttccggccggttctgtcggcatcggcggcgcgcagacggggatttatccattatccacgccgggcggctggcagctgatcggcctcacgccgttgaagttattcgatccgatgcgggagaccccggttctgctacgccctggcgatagcgtacgctttgtgccgcaaaaggagggaatatgctgaatattattcgcgcggggatttatacctccgtgcaggatagcgggcgtcacggctttcgtcagtcggggctgagtcactgcggtgcgctggataaacccgcctttcagaccgctaatctcctggtcgggaacgatgcgaatgccccggcgctggaaatcactctcggtcaactggttgtcgaatttgaaaatgagacctggttcgctcttaccggcgcaggctgcgaggcgcagttggatgatcaaccggtctggaccggctggcgattgccggtaaaagcgggtcagcgtcttacgctgcatcgtccgcttcacgggatgcgtagctatctggcggtggcgggcggtattgctgtgccggaggtgatgggatcgtatagtaccgatctgaagtccggcatcggtgggctggaaggacggctgctaaaagatggcgatcggctggcgacgggtaaaccatcgcgacagtttagcgggccgcagggcgtgaagcagttactgtgggggaatcgcatccgtgcgctaccggggccggaataccgtgagttcgatcgcgcctcgcaagaagcgttctggcgttcgccgtggcagctcagtccgcaaagtaatcgcatgggctatcgtttgcagggacaatcgttaacgcggacaacggatcgcgaactgctgtcgcacggtttgctgcccggtgtcgtgcaggtgccttacaacggccaacctattgtgttaatgaatgatgcccagacaactggcggctatccgcgcattgcctgcatcatcgaggcagatatgtaccatctggcgcagatccctctaggacaaccgatccattttgtgcaatgttcgctggaggaggcgctcaacgcgcgccgcgagcgtcagcgctatctggaacagcttacctggcgacttcagcatgaacattgatttaaatgcggatttgggcgaaggttgcgccagcgacagcgaattattaacgctggtctcctccgccaatatcgcctgtggttttcacgccggtgatgcgcaaaccatgctgacctgcgtgcgcgaggcgctgaaaaacggcgtggcgatcggcgcgcatcccagctttccggatcgggataattttgggcggacggcgatggttttgccgccggaaacggtatacgcccagacgctgtaccaaatcggcgcgctgggggcgattgtccaggcgcaaggcggcgtgatgcgccatgtcaaaccgcacggtatgctctataaccaggcggcgaaagatcctcatctggcacaggcgattgcgaaagcggtacacgactatgatccgtcactgatactggttggactggcgggaagtgagctgatccgggccggtgagcgccatcgcctggtgacgcggcaggaggtgtttgccgatcgcggctatcaggccgacggtagcctggtgccgcgcatgcaacctggcgcgctgattcacgacgaagagcaggcgctggcgcaaacgctggatatggtacaagccgggagagtgaaaagcgttactggcgtgtggacgactgtcacggcgcaaacggtgtgcattcatggcgacggcgagtatgcgcttgcattcgctcgcaggttacgcgccgcgttcaatgcgcgtaatatacacgttattgcctgagagcccgacgattgaagctattatattacggctgctaaaaattatcgtgttctgttctcttaatgtcaggaagagggatttattcaatactatataaatccccttataatatattattttaaaaataaccaagtgatgctgtaatagccagtatgatgagcttattgctgttagcagcagagtttttgaaaatcattatgatattgttagctatcgccatctaatcaaacctccggggcgggtaaactacctgactctttattacccctttctgattgatttacctcacgatagcctcatttttagcatttatattcctcatcatgacgacttatcaggagattgaagccagattgattcgctgtttcactatcacgtcatggatagcgtgccagattgccagctatatggattttaagctgtttacgcatagcaacttttttagcgaaaattaaactcatctgatcagtgattttttagtatattactcattttgttatgatggatttgttttgtgaaaagaaaatatcttacgcaagaagagattgaaaaactgctgtcagcgaccgacagaatgcccttcccggaaagaaaccgctgcttaatcctgatggcgtttattcacggcttccgggccagtgagctgctggggctgcgcttgtcggatattgatcttgcaggaagacagctttatatccggcgcctcaaaaatggcttttcaacgtgtcaccccctccttcccgatgagtataacgtactgaaaagctggctcagggccaggaagtatcttgagaaaggggctgacggagactggctgttcctgtcgctacgacggcatccgctcagcaggcaacaatttttttacatacttcgtgaggcagggcggttggccgaattaacgatagcgccacatcctcatatgctgcgacatgcctgcggctacgcccttgctgataaagggattgatacacgactcatacaggactatctggggcacaggaatatccagcacaccgtaagatacaccgcaagtaacgccgggcgttttcatggaatatggcgaaaaaaacgtcgagtataaccgtacgttctgattcaaaaagttaagtccgcttcgcgctttcatcatcctctcagatttaccccttccacacaagagtcatacaatcgtaatctattgcttattaaggagttatccatataacaataaaaaaactaagggaaaatttacctggtccaaccagcactatgctgtatccatttttgtcctgcctgcacaaaatgttaattttaagtgttaaaaaaacgtattaaataatacttaatgctgattaattatcatatcaaagaattaaatcctttattttaccttttgaatcatattgttaaatcacagagaagtctgttcagggaaagctgatttacataatcaacatataaatcaatagattactgtgttttctatttgtcattttgtactccgcacagggcagaattaccctgcggcaggagcatgtactaccagggggactgacggcctgtgcagccgaaaagcagaaccggacagggtgtcagagagcagtgtttagatagggccagacgtcatttttcatacagacatggaatggctcccggtccacgaaagggtgcggacatgttgtttccacaacacgaagctgccgttgctggcgcagtgccgggtcggcaatggccagaggagaacaatctgatgacgcaagaatatgcggaaatgtccaccggaaggggggggaccagtaagtgccggtacagtatgggggcgaaaatatttttgctcctgctggcggtctccaccgtcgcagcgttgttcagcctgtaccaggttctgacgtactgatatgcagacgttaaccagagtactgccgcctctccggctgattatgttttgtcagtcaggcgaaaatcctacgcagtttccggataccggcggcctttgcgtggaggactgcgttcgtctcaggacaccagaagggctgctggatcggttgcgtcggtggcccggcgcgatggtgatatccgccggacggccatcaacccagcttctgctgtggcaacaggtttttctgcgttatccgcggacagtggttttttgcagcagtaacgcgtttttaccggttgacgtcagcgtggaaggttacttccgccatctgaggctgattaaacgcgccatgtcggtaagggttctggccagaatggctgagcttgccatatggtcatcactacagacatcgccttacgaggaggagatgaaaagcgcgttgagcgtgccggagctggtgatggagataaacagccgcacgctggtcaggttactgtcagagcgtctgccaaaacagggacggcgggtgctgggattactgttgtcaggctgtagcccggaaatgacggcccgtatgctgggaaccggcgtgaggcaggtctggctcgcggagcagacgctgaaacaacgctgggatatcccgacaggagtaccgctatctgatgcggtaagaataaggataccggacgtcggtccggacattagccaacagagtgggttggtaaaaactggggccggtaacgcaccggatttatgctgacagcatatttacatcatgccgcgcggtattcagacccataatgttgcgttctgaatgagttatcttcacaaaataaatatggcaatcatcgttgtccggaaataccgcataacatgtgacattaatgaatctgtaatcagtgcgagggtttacgcgctgtggcggtagcgtggaattatctggatgcgttgagtaaatttcactttacccttctgatataaatgaaaatggttctggataaactatctaatattatctgtgtctgcaaacagagtgacaaaaataatgcaacgtaaaaagatactaattgtaggtgcgggcctttcaggcgcagtaatagcacgccagttagccgagcagggacatgtagtcaatattattgatcaacgttcacatatcggtggtaacgcttatgatgcccgagatgagcacacgggtattatggtgcacgtttatggtcctcatatttttcatactgataatgaaactgtatggaattatgtaaataaatacgctgagatgatgccttatatcaataaggttaaggccacagtaaatggtcaggtattttctctacctatcaatcttcataccatcaatcaattttttggtgtcgcctgctcacctgatgacgccaggaaattactgcttcaaaaatgtgatagcaccattctggaaccacaaaattttgagcaacaggccttgcgtttcattggtaaagagttatatgaagccttttttaaaggttataccattaaacaataggggcttcatccttccgcgttacccgcttctgtattgaaacgtatccctgttcgttttaattatgatgataactatttcaatcataagtttcagggaataccaaaatttggttatacacaaatggtcaagtccattgtcgaacacgaaaatatcgctgttgaactatgtcgctccttcactcaggaaatgcggacaaattatgatcatgtttttttcagtggcgcgctggatgccttttactcctgtcaatatggccgactggaatatcgtacattagactttaaaaaaataatttgccagagtgattatcaaggatgcgcagtaatgaattattgttcaatagatactccttatactcggattactgagcacaaatatttttctccgtgggagagacatgaagcttcaatatgttatcaagaatatagtcgggaatgtgaagctggtgatataccctactatcctgttcgcagggcagataaaatggatttactgaataaatatctgtcgcgggctaaaaaagaaaaaaatattactttcattggtcgtcttggcacttatcgttatctcgatatggacatcacgatagctgaagcattacagacggcggacgtatacttaacgtcgctatatgaacaaaaagaaatgccagcttttacagttaccgtttgatgaagtgtacagcgctaatcgtaacttttaaccgtcttgaaaaattaaaaaaagtgtgcgagagactgttaaggcgggtttttcctctattgttatcgttaataatggctcaagcgacggtaccagggaatggctttcttcattaagtgaacctggcatcacgatacttaatcttaaagataatcttggtggtgctggcggatttaaagtaggtagtcaatatatatgctcatatagtaatgccgattgggtatttttctatgatgatgatgcttacccggaaattaatattttaaagcatttctcgttattagatacctcaagataccgtatatttgcgtcgcgagttcaggacacctatgggcggtcttgtcggatgaatttgcctttcattagggtcccatctacggtgtttgagactatttattatgcgatgcgcccagagaggttttctccagtaagaactcaggttactgatgttcaaactgtgtcattcgttggtatgattattgatcgaaaggtattgaataaccatcttaacgatatccatgatgaacttttcctttattatgatgattttttctttggttataagctagtattgtccgggcagaaaattcgttactccccagaaattaaatttattcatgatatctctattcatggaaagtgtatctgccccgaatggaaagtatattatctttgtagaaatttgttgctgctgagaaaacttttacccgttcccaggatattcagtgttctttctatagtgttacgcctctctaaatatctcgccatattaccatggcagcgtaagaaatttcgttatctatattttatctggcagggaatacttcatggacttaaaggtattagtgggaaatatcattagcaggacgaagagatgaaaaggttatgttattttgtaaattcagactggtactttgatttacattggacagaacgtgcgatagcggcaagggatgcgggttatgaaattcatatcataagtcattttattggtgaagagattataaaaaaattcaaaacgcttggttttatttgtcacaatgtgtctcttgttgctcagtcatttaatatgtttgttttttttagagcattccttaacgctcggaaaattattaaagagattaatcctgacttattgcattgtattacgctcaaaccttgcctgattggtggggttagcgccaggagaagtaatagtccagttgttatcagctttgtcggacttggtcgaatctttttatataataccgtgccaatgagaatattgcgtgcgttaaccgttttggtttacaaatatattgccggtaataagcgtggtgtttttatttttgaacatgataaagatcgacgaaaaatatcgcgtttagtaggtattgattatcataaaactatcgttatcgaaggtgctggaattaacccggatatttataaattctctatagagaaaaaacatgagataccgatagtcctttttgcaagccgaatgttatggagtaaaggtcttggcgatctcattgaagcaaaaaagatcctcagacaaaaaaatattcattttgttttaaatgttgcaggtatattggccgaggacgataaagatgctatccctttggagctcattcatcactggcataatgaaggactaattaactggctgggacgctcttcgaatgtatatgagcttattcagaaatcgaatatcgttgcattaccatctatttatccggaaggagtaccacggcttttattagaggcatcatctgtaggacgtgcatgtattgcttatgataccggcggatgtgatagcttaattattcataactataatgggttgatcgtgaaaagtaattcagctcaggagttagcggtagaattagagtatttgttaaaaaatccacagattcgcttagagatgggggcgaatggaagaaaacgtgtaaaggaattgttttccagcatattagtcattaataagacattgcaaatttataaagacactattggttgctaacaccataaagtgcttatgaagtaggtcagtgtttagataaatagtatgtaaatattatagaaaataaataagttatattttcatatcgttaaagaataagttcttcaggtaaaggtgacacggaaacaatgaatgatttgaaagaagctctggccaggcaccaactttggatttcgctaggttggaatgatgtcctgggacgataccggcgatcggtgttagggcctttttggataacgatttcgatgggggtcaccatatcagcgatgggacctctttacggttcgctgttcagttctggttccgaaaattttatcatgcatcttactttaggtatgatcttttgggcctttctatcagcaactattaatgagtcatgcggaatatttaatgagtccgcatcaattattaaacaatctgaccttccgctatatttatatatattacgtgttttctatcggcagtttatgattatgttgcataattttatcattatacctttcgtgattttttttaccaatacatcggtaaatcttgatattctcctttttatacctgcaattgtaataacatccatctcattaatttctacaggtatgattctcgccattttttgcacaagatatcgtgatatgggaccggttgttcaaagtgtggtaacgttgtgtttttttataactcccatcatttggacatcggaacaattaccaaagggaagaaaggagtttgttgattataatattttttattactttatggagatgctcaggaaaccattaatgggaactgtaccagatgtaactatatggttttacacaataataacctctattattatgttgatggtctcaaccttagtgttgactaaatatcgctcaagaatcgtatactggttataattaatgaaaatctcttgcaaaaacgttggcgtaatactccctatatttaactccagccaccgttcatttaaaaaaacttttctacaggctgcttcaggtggacgaattggctcatcgaataccgggattattgaagtagaggcattaaaaaaaattgattttacgcttaccgaaggtaaccgtcttgcgcttatcggacacaatggttcgggcaaaacaactcttctgagagtacttgcaggggcctataaaccaacttcagggaagtatgaatgtattggtcgagtcaccagcctcattgatcccatgatgggaatggatggtgagcttaccggcctggaaaatataaaactgaggggactatttctcggtctgtcaaaaaatgaaataaaaaatattacagaagatgtcatcgagttcagcgagttaggtgattttattaaaatccccgttagaacgtattctagtggtatggttctgaggcttggtttttctatttctactgcaattaatcctgaaattttactgatggatgaatggatgagcgtgggtgatagtgattttaaaagaaaagcagagatgagattaaatagctttatctctaaagcgggcattatggtaatggccactcacgatgatgaactggctaaatctgtatgtaataagttcatcaggcttgagcacggtgagatagttagcaaaggcggattttaatattcttattgcagtatttatatcactacgcggtgagaaatttactattttataatagcgttaccccagataatataaatttataggttcgttatgtattttttacttcaaaaagtaattttaccaaacattgatctatgcacggaagagcagctttatttcagaactcagggcgggaagtataactatacctcacgtaacttacttgttccgcgtcataaggttgcatattttgatactttttttaatgcattctcaattaagaaatggaaaaaatatacaaccttaacatcactttttttgcgggttaatataattggtcgcggaactataactgtaaggcataaagagaatggtgtcattagagtattaaagcaaattgattttaaatcgtcatgtaatattagtgatgagattgagattgatatatcaaaaataaattttggatatatctatgtggagtggcaatcagacgaagactctgttttaaatggatttgaattgctgactaaagatcatgttagtaaatcatctatggctttagttataacaacttataatagaaaagaagctgttactaaaacaatcaatagaattaataaaacactcttaacccagagcgaatttaaagatcgttttaaattgattgtcgttaataatggcgaggcgattaatcacccgtcaggaaacggcattatagttatcaataatgaaaacctcggtgggtcaggcgggtttatgagaggtttgatagaggcagggaaaatcaacgatgtcaaacatgtcatatttatggatgacgacggctcatgtgaaattgaatcgatttgtcgaactcatgcttttttactgatggctaaagacaaaaatacagttgttactggctgtatgctttttgaagataacccggcaatcatacatgaatctggtgccatatggcatagagattttttacattacccggataaacattatctggatgctcgggaaatagattctttagatacttttgataatgaaagaaaaataggctacggtggatggtggttttttgcctttaatattaacgctattgaatattactcatttcctttctttgttcgtggtgatgacctgctatttggatatatgcataaaaaacataatattgtcacacttaatggtgtggcttcgtggcaaatggattttgaaagaaaaatatcggttctaaatagctatttgaacttcaggactgttgctgtacctgcattaattagtaaaagaaagtttgctgcactactgttaagtgttttctttgtgcgggaagtctttcttgcgagtttttcatgccgctatgaacttgccagagcaatgattatgtcatataacgattgtctttctggacgggagttttgggaagataatgtagatcttctggagataagaaaaagaattaatgcaataactcataatgaaaaattcaatgtagaaggtattgatattgttaatggttgtgttgattacccatgttctggtaaagaaaaagccatctacaaattttttagatgcataacccttaatggacacttaattccagctttctttttaattaaaaaaccaatcgtggttgattatcgtcattatcaccctactaagttttcattccggagaattactatctatcatttaaatatagaaaatggcaaattattaaaacttacccactcaaaaatggagttttttaaagttattattaatggtttgtttacggcagtcaaaaatttttatcggtttaaatctgcaaaaaaagagatgaaaaatagtttgccctatcttacctcaaagctcttttggtataaaaaattcaataaaaaatctgaagataaatattaaacatgatgtaagtggtgttgatgagaattataccgattttttaattatatgactatgataatcttaggtatggttctgttgctacaccttatctggtgtcagtctaataaaatattataatccttacccaatgtcagcatttattcatagggtgttaatttttatatataccgtaaaacgcgaaatcagaatatggaaaagagtcttttagttattgtccgacataaacctgggcgtactcgtctattaatgcgggccttgcaatccattaatgaccagacgttcaaaaaaataaatatcatcattttctgcatggaggaagaattgaaatgtcacaatgtggatgatttttatctgaaagaactgtcaaatatatatagtgttatctacgacgaaagctgtatctttaatgctattaagatgtctgaatctaattatttatgctttatggatgatgacgattcttgggcccctgaatatgtgtcaaggctactcagtgttttggcgaatatacagtcaacgtattcatctgtaaatgcaatagcatgccatacaaataaagttgctgagattgcggaaaataatagaataattataaattcaacgcaaccatggaaccactatttaaatgctggccctgttagttttgatgttatttattacaggaattctattccactttcctcgtgtttattcgataaaaattctgttatcgatatgattgaaagtcataaattatcctctcctgcatttttctggcctttttttattcattaccttgcagaaaatgatgtttggatcttacctgaagcactggcattttatcatttcagagaaaatgatgactttgaatttggcaattataccgtaattaacaatgagttatttgatatagaatgcaaaattgcagaaaataaaatgatgagaagtattgatgactcatcattgctcaatgtgttactttcaaatattgctaacaatagtctttttcataaaatttcttatattgaaaataagattaaataaaatatggatatgaactttaaaaaatacaagaccgtaagctttgatatctttgatacattggttagccggaggatttaccgtcccagagatttgttttcattaatgcaatcaactttagcaactgagaaattttttatatcagcgtacgagattggtattattgataatttcccagagataagagttcaggcggaagtaagtgccagagagaatagggtcaggcgttttggcggcgagccggaaatacttatatctgaaatatacgatgaaattttaaaaaagcatccgcagctttcaccagcgacagtaaaaaagataatcgatctggaaatacaaatggagaagattgttttatataaaaatgcgcgtggaagctgtttgtttgaaaaggctattagtgatggttgcaaagtcattttaattagtgacatgtaccttccatcagcaatattaaaggagttgttaacatcatgtggctatgatatcagtaacattccagtttattcatctggcgaagagcggtactctaaaaatagtggtaaattattttcaatagtcaagaaaaatgaaaatgtagatattgcatcgtggatgcatgttggcgacaatgttcatgctgatattctgaatgctaaaaaactcggcataaatactctccatgctgattggtcagagtataatcatgggatatctaatcattggaaagctaaagatattattggtgaatctatttgtaagactttattacttaaacaagtttctgctttccatcaaaatgatcctttaaacgagataggatttaaagtatttggtccattattattaggttatgtatcctggttagcgaatcagttaaagattcataaaattgataaagcgctttttttagcacgcgatgctcacttaatctataaaatttataatgaatacttttcagaagaacatgtaaaatgtgaatatttatatatatcccgcgcatcagcttatatggtggggatgactgattggccgatgcacaggatttggcatctttttggtggtaagaataagaaaagtattaaaaagatacttgctatcgcggggttagatgcgagtgagcatatttcagatatacatcatgttggttttcctgacgaggagtatattcctgtttcaggagaggaacataaggttcactggcttataaataaattatttccatatattttattaaaaaatactcagcacagggaagtttacgctgattactttaaaacggcctgtgaaggttataaaaatatagcacttatcgatgtaggatggatgggtaatattcaatcagtatttgctcgttctttaggtgcgcaatgggcagaaaaacaaatacatgggttttatttggcaacttttgctggcgccaatgataaccgatctatttataataagatgtttggttggctaaccaactatggccatcccaacgataagtgtgatcttttcttatcaggaggggtggaaataatggagttcgctatggctgacaatactgggtcaacaattggctataaaaaaacggataatggaataattcctgtacgtgaagatagcagtggttctgaaattgagtatttaaaaaaagcagcaagattgcaatcagggattatttctttttttgagtacgtcaaaccgctcatacaaaaaggaaattatgcagcacttagtagtgttgtattgtcagaacctttttttgaattgatagccagaccctcaagcgctcaactggacgccttatcttccctcacacattcagagtccgcgggatctaacgcagaaagaatcgtgctagccaagaaactgcctttaaaggataaactttttcccggagaaaattatatcaaagagttgaatgccagttattggaaagaaggctttaaaaggatcaacagaaaaaaattttgggcaaaatataactaagcgtcatttaattccggtaggcagacaatcattattgggcgctcgcccgacaagggctgagtcgattatgccctggcgcgatcatgttaaccctgacggggaagtggtctcgtgctgcgataatgttattatcactggataccaccgcctgtttgtccatccgctgtggatgttcattatggtgttcgatgtgcattccagatagtcagaggcggtgtagtccattaatcaactgttaacaaaggatattatcatgcctgaaggcccggaaattcgtcgtgcggcggataatctggaggcggcaatcaaaggcaaacccttaaccgatgtctggtttgcctttgcacagttaaaaccgtatgaatcgcagcttaccggtcaacttgttacccggatagagacgcggggaaaagcgttattgacccacttttcaaatggcctgacgctctacagccacaaccaactctatggcgtatggcgggtgatcgatactggtgaaataccgcagaccacgcgtatattgcgcgtcaggctacaaacggcggataaaactattctgctttatagcgcgtctgatatcgaaatgctgacagcagagcagctcacgacgcacccctttttacagcgagtcggtccggatgtgctggacgcgcgtctcactccggaagaggttaaagctcgattgctgtcgccgcgttttcgcaaccgacaattttccgggctgttgctggatcagtcctttctggcgggactggggaattatctgcgcgttgaaatcctctggcaggtaggattaaccggacagcataaagcgaaagatctcaacgaggcgcaactgaatgcgctttctcacgcgctgttggatattccgcgcctttcctacactactcgcggtcaggcggatgagaacaagcatcatggcgcactgtttcgctttaagcttttccaccgtgacggcgaagcgtgtgagcggtgcggcggcattattgaaaagacaacactgtcctcacgcccgttttactggtgcccgcattgccagaaatagccggaaccgacatcggcgagcggctattgcctgatggcgcgacgcttatcagccctacaaaggttgtttgggcgcataggttgatataaaacgggccactgctggcccagttaacagaatgctgaacagccgtagggtttgcattgccatgatgagcgccatatcggcactgcttcctgccgcgatcgcggcaaccgtatccagaccaccgggactggtggcaagataagccgtcataaaatcaatctgcatgtagtaagccattccccacgccatcgcggcgcaaatcgccatcagcgcgaaaattgacaataagatttgcggcaatggccgcagcgccataaaaaacacctgtctgtcaaaacccagcccaatacgccagcctatcgccatatacgccacggccagcagccattcgggtaattcaatctcaatgatgccttgcgaatggagaagcgcgcctgccaacatggggagcagcatcgtgccggaagggatacgcatcaggcgaccggcaatgcccgccacgatcgctaataacagcgtcgtcaatacattaccgctaagcggcggaaaccagatcacctgttggctgaccgctgccgcgctgtcgccgagtatcaggcgtgtcaccagcaccgccgcgccagccacaaacagtacccgtagatactgcataaacgccaccaggcggatatccgccccgtaatcttgcgccatcgctaccattgccgccgcgccgcccggcgaagacccccatgcgccggtgttgccgggcagtgagctgtaacgtaccagcagccagccgactaccgcgctggaaagcagcgtcaccagcaacactaaaagcacgaccggccagtagagggcgagggtggtcaatatcgaaccggttagattttgggcgatcatacagccgagaattgcctgcgcggcgagaaaaataccgcgcggaagttgtagcgtactacctcgcaaactcaacacgatacccgcaatcattggaccgagcagcattgccgccggaaggtgcagatagagaaaaataagggaaatgagcagcgataacaggaacaacaaaaaccactgcagaatcggcattccatgctccctgaatgatatttagcgaaaccttaattaatcatagagagtaacggggtaagaataaaataatgaggataagaaaaaagggaaaatgtaccggatggcgagggttgcgtcgccatccggttgtcaattaacgcttcagcgccgatttaaaatcgcgtttatcgtagccggtatacagctgacgaggacgggcgattttcatgccgtcagtgtgcatttcattccagtgtgcaatccagccaacggtacgcgccatggcgaagatcacggtgaacatggaggacggaatgcccatcgctttcagaatgatgccggagtagaagtctacgttcgggtacagtttcttctcgatgaagtacgggtcgttgagcgcaatgtgctcaagctccatcgccacttccagcagatcgtctttggtgcccagctctttcagcacttcgtggcaggtttcacgcatcacggtggcgcgcggatcgtagtttttgtaaacacggtgaccgaagcccatcaggcggaaagaatcattcttgtctttcgcacggcgaacaaattccggaatgtgtttaacagagctgatttcttccagcattttcagcgcggcttcgttggcgccgccgtgcgcgggtccccacagggaggcgatcccggcggcaatgcaggcgaatgggttggcgccgcttgaacctgcggtacgtaccgttgacgttgaggcgttctgctcatggtcagcgtgcaggatcagaatacggtccatcgcgcgctctagtaccggattcacttcataggtttcacacggcgtggagaacatcatgttcaggaagttaccggcgtaggaaaggtcgttgcgcggataaacaaacggctgaccgattgaatatttgtaacacatcgccgccatggtcggcattttggacagcaggcggaacgccgcgatttcacggtggcgcggattgttcacatccagcgagtcgtggtagaacgctgccagcgcgccagtgatcccgcacattaccgccatcggatgtgagtcgcgacggaaagcatggaacaggcgagtgatttgctcatggatcatcgtatggcgggtgactgtcgttctgaactcgtcatactcttcctgcgtcggtttttcgccgtacagcaggatgtaacagacttccagatagttggaatcggtagcaagctggtcaatcgggaaaccgcgatgcaacaaaatgccttcgtcgccgtcgatgaaggtgattttagattcgcaggatgcggtagaggtgaaaccagggtcaaaagtaaaaactccttttgaaccgagactacgaatatcaataacatcttgaccgagtgtaccttttagcacatccagttcaatagcagtgtcaccagtaagggtgatttttgcctttgtatcagccatttacggtctccttagcgccttattgcttaagactgccggaactcagacttgccttctccacgtcatcttcctcgtcgttagtgcagggaagattctgtgtatgcatcaatcaaccgttaccagtttgttatttggctcgccgctctgtgaaagaggggatgacctgggtacagagcaatgggcgcttgcaggtaacgacttgattaatttcgaattagcagcaaatcaggaacgtagcaatccgagtaatgtaacctgtctatcactaataactgtcctgaaagaatgggtcaatatcattgtactgttgcataacttattaacaggtgaaagagtgaccccataacttttacgcattatatgctttttctggtgtcgtttgtaacaattttgtttaatgtttgtcaaatcagatgattgaaaattaaaaaaatgttgttatcgtgacctgtgtcactgttcaggataaaacccgacaaactatatgtaggttaattgtaatgattttgtgaacgtcctatactgccgccaggtctccggaataccctgcaatcccgagccacccagcgttgtaacgtgtcgttttagctactggaagcagtgttttacatgacgcgcagttatagaaaggacgctgtctgacccgcacgcagaccggaggaaggaaatcccgtcgtctttctggctacaggtagattcacctctgtaaccgaagtcttaagggaataataagaacagcatgtgggcgttattcatgataagaaatgtgaaaaaacaaagacctgtcaatctggatctacaaacgattcggttccccatcacagcgatagcgtccattctccatcgcgtatccggtgtgattactttcatcgccgtcggcatactactgtggctactgggcaccagcctctcttctccggaaggattccagcaggccgccgacatcatggacggcttcatcgttaaatttatcatgtggggcatccttaccgcgctggcgtatcacgtcatcgtgggaattcgtcacatgttaatggattttggctatctggaagaaacattcgaagcgggtcaacgctctgccaaaatctcttttgttatcactgtcgtgctttcacttctcgcaggagtcctcgtatggtaagcaacgcctccgcattaggacgcaatggcgtacatgacttcatcctggtccgtgctaccgctatcgttctgacgttatacatcatctacatggtgggttttttcgccacgagcggcgaactgacctttgaagcctggaccggtttcttctcatcggccttcaccaaagtcttcaccctgctggcgcttttttccatcttgattcatgcctggatcggcatgtggcaggtgttaaccgactacgttaaaccactggcagtgcgtctgatactgcaactcgttatcgttgttgcgctggtggtttacgtcatctatggatttgttgtggtgtggggtgtgtaatgaaactgccagtcagagaatttgatgctgttgtgattggtgccggtggcgcaggtatgcgcgcggcgctgcaaatttcccagagcggccaaacctgtgcgctgctctcgaaagtcttcccgacccgttcccataccgtttccgcgcagggcggtatcaccgtggcgctcggcaatacccatgaagataactgggaatggcacatgtacgacaccgttaaggggtcggactacattggtgaccaggatgccatcgaatatatgtgtaagaccggaccggaagcgattctggaactggagcacatggggctaccgttctcccgtcttgatgatggacgtatctatcagcgcccgttcggcggccagtcgaaaaactttggcggcgagcaggcggcacgtaccgcggcggcggctgaccgtaccggtcacgccttgctacacacgctgtatcaacagaatttgaaaaaccacaccacgattttctccgaatggtatgcgctggatctggtgaaaaaccaggatggcgcggtggtggggtgtaccgcactgtgcatcgaaaccggtgaagtggtgtacttcaaagcccgcgcgacggtgctggcgaccggcggcgcaggccgtatctaccagtccaccaccaacgctcacatcaacaccggtgacggtgtcggtatggcgctgcgtgccggtgtcccggtgcaggacatggaaatgtggcagttccacccgaccggcatcgccggggcgggcgtgctggtgacagaaggctgccgcggcgaaggcggttacctgctgaacaaacacggcgagcgctttatggagcgttatgcgccgaacgccaaagacctggcgggtcgtgacgtggtggcgcgttccatcatgatcgaaatccgtgaaggccgcggctgtgatggtccgtgggggccgcacgctaaactgaaactggatcacctgggtaaagaggtgctggaatctcgcctgccgggtatcctggagctgtcccgtactttcgcccacgttgacccggtgaaagagccgattccggttatcccgacctgccactacatgatgggcggtattccgactaaagtgaccggtcaggcgctgaccgtgaacgagcagggcgaagacgtggtcattccggggctgtttgcggtaggcgaaatcgcctgtgtatcggttcacggcgccaaccgtctgggcggtaactcactgctggatctggtggtctttggccgcgcggcggggctgcatttacaggaatccatcgccgagcagggcgtgctgcgcgacgccagcgagtctgacgttgaaggttctctggagcgcctgaatcgctggaacaataaccgcaatggcgaagatccggtggctatccgcaaagcgttgcaggagtgtatgcagcataacttctccgtattccgtgaaggcgacgcgatggcgaaagggcttgagcagttgaaagtgatccgcgagcgtctgaaaaacgcccgtctggatgacacgtccagcgagtttaatacccagcgtgttgagtgtctggagctggataacctgatggaaaccgcctacgccactgccgtatcagccaacttccgaacggaaagccgcggcgcgcatagccgcttcgatttcccggagcgtgatgatgccaactggttgtgtcataccctgtatcagccgcaaacggaatccatgacgcgccgaagcgtcaatatggagccgaaactgcgtccggcgttcccgccgaagattcgtacttattaattgcggagacaggatgatgaaactcgaattttcgatttatcgttataacccggatgtcgataacgctccgcgtatgcaggattacaccctggaaggcgaagaagggcgcgacatgatgctgctggatgcgttaatccagcttaaagaaaaagatcccagcctttctttccgccgttcctgccgcgaaggtgtgtgcggttctgatggtttgaatatgaacggtaagaatggtctggcctgtattacccctatttcggcgctgactcagccgggtaagaagattgtgattcgcccgctgcccggtttgccggtgatccgcgatttggtggtagacatggggcaattctacgcacaatatgagaagattaagccttacttattgaataatgggcaaaatccaccggctcgtgagcatctgcagatgccggagcagcgtgaaaaactcgatgggctgtatgaatgtattctttgcgcctgttgctcaacatcctgcccgtcattctggtggaacccggataagtttatcggtccggcggggctgctcgcggcgtatcgattcctgatcgatagtcgtgataccgagactgacagtcgtctggaagggatgagcgatgcattcagcgtattccgctgtcacagcattatgaactgcgtcagtgtatgtcctaagggactgaacccgacgcgcgctatcggccatattaagtcgatgctgttgcagcgtagcgcataagtagttgtagtggttgccggatggcgacgtacagtcttatccggcctacaggcgcaaccccgtaggcctgataagcgcagcgccatcaggcaatagaagtgcaggaaacctctaaaaactgccatatgattagtaataatcgagatgttcagagcgagacaaggcgcggtctgaacgaatcttcgggagcatagttaactatgtgaccggagtgagcgaaggccgcaacgcagtcgtagcctgaacagcgaagattattagacagtttttaaaggttccttagcggacgcagatgacacgacagtccgcaacaagtgaaccccggcacgcatacagcgtatgcgtggttagtatccacggcgaaatactcgtcatagttcacgttgcatgtgcgttggctgcacttgctcaccccggtcacttactggatgtaagctcccagggattcgcaagcttgccgccttcctgaaacgtgacctatttagagtattaaataagcagaaaagatgcttaagggatcacgatgcagaacagcgctttgaaagcctggttggactcttcttacctctctggttcgaatcagagctggatagaacagctctatgaagacttcttaaccgatcctgactcggtagacgctaactggcgtttgacgttccagcagttacctggtaccggagtcaaaccggatcaactccattcaaaaacacgtgaatatttccggcggcaggcgttggctggctcacgtcactcttctacgatttccgaccctgacaccaatgtgaagcaggttaaagtcctgcagcttatcaacgcttatcgtttccgtggccatcaacatgcaaacctcgatccgctgggactgtggaagcaagaacgcgtggcggatctcgatccttctttccatgatttgaccgaggccgatttccaggaaaccttcaatgtcggctcctttgccagcggcaaagagacgatgaagctgggcgagctgctcgacgcgctcaaacagacctactgcggcccgattggcgctgagtatatgcacatcaccagcaccgaagagaaacgctggatccaacagcgcatcgaatccggtcgtgcggcctttagcgctgacgagaaaaaacgcttcctgaacgaactgaccgccgctgaagggctggaacgttatctgggcgccaaattcccgggtgcgaaacgtttctcgctcgaggggggagatgcgctgatacccatgctgaaagagatggttcgccatgcgggtaacagcggcactcgcgaagtggtgctggggatggcgcaccgcggtcgcctgaacgtgctgatcaacgtactgggtaaaaaaccgcaggatctgttcgacgaatttgccggtaagcataaagaacatctgggtaccggcgacgtgaagtatcacatgggcttctcgtcagatatcgaaaccgaaggcggtctggttcacctggcgctggcgtttaacccatcgcatctggaaattgtgagcccggtggtgatgggctccgtgcgcgcccgtctggacagactggacgaaccgagcagcaacaaagtgttgccgatcactattcacggcgacgccgcggtgaccggccagggcgtggttcaggaaaccctgaacatgtcgaaagcgcgcggttacgaagtgggcggtacggtacgtatcgttatcaacaaccaggtgggtttcaccacctctaacccactggatgcgcgttcaacgccttactgcaccgatatcggtaaaatggtccaggcgccgattttccacgtcaatgcggacgatccggaagccgtcgcttttgtgacccgtctggcgctggacttccgtaatacctttaaacgcgatgtctttatcgatctggtgtgctaccgccgtcacggccacaacgaagccgacgagccaagcgcaacccagccgctgatgtaccagaaaatcaaaaagcatccgacgccgcgtaaaatctacgccgacaaactggaagctgataaggtcgcaacgctggaagatgccactgaaatggtcaacctctatcgcgatgcgctggatgcaggcgaatgcgtggtgaaagagtggcgtccgatgaatatgcactcgttcacctggtcgccgtatctaaaccacgaatgggatgaagcatacccgaacaaggtagaaatgaagcgtctgcaggagctggcaaaacgtatcagcaccgtgccggaagccattgaaatgcagtctcgcgtggcgaaaatttatggcgaccgtcaggcaatggcggcaggcgagaaattgtttgactggggcggcgcggaaaatctggcttacgccacgctggtcgatgaaggcattccggtgcgcctgtccggggaagactctggtcgcggcaccttcttccatcgtcatgcggtgatccacaaccagacgaacggctcaacgtatacgccgttgcagcatattcacagcggtcagggacagtttaaagtctgggactccgtgctgtctgaagaagcggtactggcttttgaatacggttatgccacggcggaaccacgtaccctgactatctgggaagcgcagtttggcgattttgccaacggcgcgcaggtagtgattgaccagttcatctcctccggcgagcagaaatggggccggatgtgcggtctggtgatgctgttgccgcatggctatgaagggcagggcccggagcactcttccgcgcgtctggaacgttatctgcaactttgcgccgagcagaatatgcaggtttgcgtgccgtccaccccggcgcaggtctaccatatgctgcgccgtcaggcgctgcgcgggatgcgtcgtccgctggtggtgatgtcgccgaaatcgctgctgcgtcacccgctggcggtttccacgcttgatgaactggcgaacggttccttccagccggccattggcgaaattgacgagctggaccctaaagccgtaaaacgcgtggtaatgtgttctggtaaggtttattacgacctgctggaacaacgtcgcaaaaacgaccagaaagatgtcgctatcgtgcgcatcgaacagctctatccgttcccgcataaagcggtgcaggaagcgctgcaaccatacgctcacgtccatgattttgtctggtgccaggaagagccgctcaaccagggcgcatggtactgcagtcagcatcatttccgtgaagtgactccgtttggggccgctctgcgttatgcaggtcgcccggcctccgcctctccggcggtagggtatatgtccgttcaccagaaacagcaacaagatctggttaatgacgcgctgaacgtcgattaaataaaggataaataatgagtagcgtagatattcttgttcccgacctgcctgagtccgtagcggacgcgaccgtcgccacctggcataaaaaaccgggcgatgcggttgttcgtgacgaagtgctggtagaaatcgaaactgacaaagtggtactggaagtaccggcatcagcggacggcattctggatgcggttctggaagaggaggggacgactgtcacctctcgccagatcctgggtcgcctgcgtgaaggaaacagcgcgggtaaagagaccagcgcgaaatctgaagagaaagcgtctacgccggcacagcgccagcaggcgtcgctggaagaacaaaacaacgatgcgctcagcccggcgatccgtcgcctgctggctgaacacaatctggaagccagcgccattaaaggcactggtgtgggtgggcgtctgacccgtgaagatgtggaaaaacatctggcgaaaggcgagtctaaagcacccgctgttgaacctgcagcacaacccgctctgggcgcgcgcggcgaaaaacgcgtgccaatgacccgcctgcgcaagcgcgtggccgagcgtctactggaagcgaaaaattccaccgccatgctgacgaccttcaatgaagtcaacatgaagccgattatggatttgcgtaagcagtatggcgaagtgtttgaaaaacgtcatggtatccgcctgggctttatgtccttctacgtgaaagcggtagtggaagcgctgaagcgttatccggaagtgaacgcctctatcgacggcgatgacgtggtgtatcacaactactttgatgtgagcatggcggtgtctacgccgcgcggcctggtcacgccggtcctgcgtgacgtggatacgctgggcatggctgacatcgagaaaaaaattaaagaactggctgtcaaaggccgcgacggcaagctgaccgtagaagacctgaccggtggtaactttaccattaccaacggcggcgtattcggttcgctgatgtctaccccgatcatcaacccgccgcagagcgcgattctgggaatgcatgctattaaagacaggccgatggcggtggatggcaaggtggaaatcctgccgatgatgtacctggcgctctcttacgatcatcgcctgatcgatggtcgcgaatccgtgggcttcctggtcaccatcaaagagttgctggaagatccgacccgtctgctgttggacgtgtagtcagcaagagcatcacctgctacctgtaggccggataaggcgttcacgccgccatccggcgatggtgtaatgcctgatggcgcgcagctttcaggcctacaggtctaaagataacgattacctgaaggatggacagaacacatgaacttacatgaatatcaggcaaaacaactttttgcccgctatggcttaccggcgccggtgggttatgcctgtactactccgcgtgaagccgaagaagccgcgtctaaaatcggcgctggcccgtgggtagtgaaatgtcaggttcacgctggcggccgcggcaaagcgggcggtgtgaaggtagtaaaaagcaaagaagagattcgcgccttcgcggaaaactggctgggcaaacgtctggtgacctatcaaacagacgctaatggccaaccggtaaaccagattctggttgaagcggcgaccgacatcggcaaagaactgtacctcggcgcggtagttgaccgtagttctcgtcgcgtggtctttatggcgtctaccgaaggtggcgtagagatcgaaaaagtcgcggaggaaaccccgcatctgatccataaagtcgcgctcgatccgctgaccggcccgatgctgtatcagggacgggaactggcgttcaaattgggtctggaaggtaaactggtgcagcagttcaccaaaatctttatgggtctggcaaccattttccttgagcgcgacctggcgctgatcgaaatcaacccgctggtgattactaagcagggcgatctgatttgcctcgacggcaagctgggcgctgacggcaacgcgctgttccgccagccggatctgcgtgaaatgcgtgaccagtctcaggaagacccgcgtgaagcgcaggcagcgcagtgggaactgaactacgtcgcgctggacggcaacatcggttgcatggtgaacggcgcgggtctggcgatgggcaccatggacatcgttaagctgcatggcggcgaaccggctaacttccttgacgtgggcggcggcgcaaccaaagagcgcgtcaccgaagcgtttaaaattatcctctcggatgacaacgtgaaagcggttctggttaacatcttcggcggtatcgtccgttgtgacctgattgccgacggtatcatcggcgcggtggaagaagtgggcgtgaacgttccggtggtggtgcgtctggaaggcaacaacgccgaactcggcgcgaagaaactggctgacagtggcctgaatattattgcagcgaaaagtctgacggatgcagctcagcaggttgttgccgcagtggaggggaaataatgtccgttttaattaataaagataccaaggttatctgccagggcttcaccggtagccaggggactttccactccgaacaggcgattgcttacggtacgcagatggtgggcggcgtaacgccgggcaaaggcggcaccacgcatctggggctgccggtgttcaacaccgtgcgcgaagcggtagaagctaccggtgcgaccgcatccgttatctacgtcccggcgccgttctgcaaagactccatcctggaagcgattgacgcaggcatcaaactgattatcaccatcaccgaaggtattccgacgctggatatgctgaccgtgaaagtgaagctggacgaagcaggcgtgcgcatgatcggcccgaactgcccaggtgtgatcaccccgggcgaatgcaaaatcggcatcatgccgggtcacattcataagccgggtaaagtgggtatcgtttcccgttccggcacgctgacctacgaagcggttaagcagaccaccgactacggtttcggccagtccacctgcgtgggtatcggcggcgacccgattccgggctctaactttatcgatatcctgaaactgttccaggaagatccgcagactgaagcgatcgtgatgatcggtgagatcggcggtagtgcagaagaagaagcggcggcttacattaaagaccacgtgaccaagccggttgttggctatatcgcgggtgttaccgcgccgaaaggcaagcgtatgggccacgcgggcgccatcattgccggtggtaaaggcactgcggatgaaaaattcgcagcgctggaagccgcgggcgtgaaaaccgttcgcagcctggccgatatcggcgaagcgctgaaagcaattataaaataaaactcgctgttcctgcgggaacagataaatgtccgttttcgacatggttggccacctttacggtggccttttttatggctttattgtttgtggcaaagtacgggtgaagcatccgggatataaaattattggctttgtaaatactgaactataggaaaataatgcctcattaaaaaaacatggtggagtctaaaaataattgataataaccgtctggcagcggcagtaaatttactcagtttgctggttaactcttttgcagcaaatacagatgctgtcttagtgaaatacctgccgacctcactggagacggattatgcgctttccgccatgaaaaaaacgcattgcagcattacactatgttgacgctaacctctatagtaaattgacgcttgactctgtggccgcgcatgtttgcctgagcgcgaactacatgtctcctcagatgtatcgcgcttacacagactgcttgtttaatggcagaataaaacagctattttaatcataagagtaccgacattatttccatgaagtattaaagatatcgtttaataaatcatatgaacttttgctggttaaaagaggttaactttaaaaattattaagaacttattgacactattcgttcgtgattaatcatgtttaaaggatatttatggctgcgaataaacagaattatcactatgagtgacgtagaaattgagggtgaatctgtgaaggtgataacagaatcttcgctataataattatagagaggtaaatacggtgttattgaaataaagaaaaattagcgaataaaatgtttgtttctggctatctggaaagcttattagcgataattaaggcgataacctggcaagatgagcctggccattagtcgtcgggaaagggaagttggggcagggtaatcccggtgggatgatggcgcgtgtgcaatgagatagtttctttgctgtgttaattataagtaaaataaaaatagactaaatgtataaaataataagtattgataacctgcagaaaaaatctgtgagctatttagcaataattgaacatcaatgtggaatgttttttactggatgcggggcagtaaaaaacgcacaaaatgtttagccttatcgaataagtctctttttacagggggtttgaaattactctttgcaaaaacaaaaagttaacaaaaaattcaccatgcattcaatgaataaacattattaacattaacttcaaaaattgattttaatcaatatttaaatgttggaaaagagcatcaaaactggttaaattgtccgtgatcaaattccctgaaaagcgatagattagccataaattgatcgctgtcgaaaaaagcaaatctgacccactaaaaacctgtttattgtaagggttttacggcgtaatatatttgcgggatcaatttgggttttttattaacatgtttgtaacttttcatcattactgtttccttcccgaggggatagtacgatggaaggccgcaaataaatttgtattggggcatgcgtgtgaccctttctaacggggttcactctcggagtcttcatgcgatgagcaaggagtcatgatgttagatatagtcgaactgtcgcgcttacagtttgccttgaccgcgatgtaccacttcctgtttgtgccgctaacgctcggtatggcgttcctgctggccattatggaaacggtatacgtcctttccggcaaacagatttataaagatatgaccaagttctggggcaagttgtttggtatcaactttgctctgggtgtggctaccggtttgaccatggagttccagttcgggacaaactggtcgtactactcccactatgttggggacatcttcggtgcgccgctggccatcgaaggtttgatggccttcttcctcgaatccacctttgtaggtctgttcttcttcggctgggatcgtctgagtaaagttcagcatatgtgcgtcacctggctggtggctctggggtccaacctctccgcgttgtggattctggtagcgaacggctggatgcaaaacccaatcgctgcggatttcaatttcgaaaccatgcgtatggaaatggtgagcttctctgaactggtgctgaacccggtagcacaggtgaaatttgttcacactgtggcgtccggctatgtcaccggcgcgatgttcatcctcggtatcagcgcttactacatgctgaaaggtcgtgacttcgcctttgctaaacgctcctttgctattgccgccagcttcggtatggctgccgtactgtccgttatcgtactcggcgacgaatccggttacgaaatgggcgacgtgcagaaaaccaagctcgctgcgattgaagctgaatgggaaacgcaacctgctccggcctcctttaccttgttcggtattcctgaccaggacaaacaggaaaaccatctggcgattcagatcccttatgcgctcggtattatcgctacgcgttccgtggacacgccggttattggcctgaaagatctcatggttcagcatgaagagcgtatccgtaacgggatgaaagcctatgaactgctggagcagctgcgcgccggttctaccgaccaggccgttcgcgaccagttcaacagcatgaagaaagatctcggttacggcctgctgctgaaacgctatacgcctaatgtgactgacgcgaccgaagcgcagatccagcaagcgacgaaagattccattcctcgcgttgcgccgctgtacttcgctttccgtatcatggtggcgtgcggcttcctgctgctggcgatcatcgcactttccttctggagcgtgattcgtaaccgcatcggtgagaaaaaatggctgttgcgcgcggcgctatacggtattccactgccgtggattgcggttgaagcaggttggttcgtcgccgagtatggtcgtcagccgtgggcgatcggcgaagtgttgccgacagccgtagcgaactcatcgctgaccgtgggcgatctgctgttctccatgttcctgatttgcggcctgtataccctgttcctggtggcagaattgttcctgatgttcaaatttgcacgccttggcccaagcagcctgaaaaccggtcgctatcactttgagcagtccaccgtgacttctcagccggcacgctaagacaggagtcgtcaaatgatcgattatgaagtactacgttttatctggtggctgctggttggcattttgctaattggtttcgctgtcaccgatgggttcgacatgggggtggggatgctcacccgtttcctcggtcgtaacgacaccgaacgtcgaattatgattaactctatcgctccacactgggacggtaaccaggtgtggttgatcaccgcgggcggtgcgttgtttgctgcctggccgatggtttacgccgcggcgttctccggtttctatgtggcgatgatcctggtgctggcgtctttgttcttccgtccggtcggttttgattaccgttccaagattgaagacccgcgctggcgcaacatgtgggactggggcgtgttcatcggtagctttgtgccgccgctggtgattggcgtggcctttggcaacctgttgcagggcgtaccgttccacgtggatgagtatctgcgtctgtactacaccggtaacttcttccagttgctgaacccgtttggtctgctggcgggtatcgtaagcgtagggatgatcatcacgcagggggcgacttacctgcaaatgcgcaccgttggcgaactgcacctgcgcgcgcgcgccacctcgcagattgcggcgctggtgacattagtgtgctttgcgctggcgggcgtttgggtaatgtatggtattgatggttatgtcgtgacatccgcgattgatcatcatgccgcctctaacccgctgactaaagaagtggcgcgtgaagctggcgcctggctggtgaactttaataatgctccgatcctgtggttggttccggctctgggcgtggttctgccgctgctgactatcctgacttcccgtatggagaaaggcgcgtgggcattcctgttctcttcgctgaccctggcctgcattattctgacggcgggtatcgctatgttcccatttgtgatgccgtccagcacgatgatgaatgccagcctgaccatgtgggatgcgacatccagccagatgacgctgaacctgatgacctgggttgcggcggtgttcgtaccgatcattctgatctacaccagctggtgttactggaaaatgttcggtcgtatcactaaagaacatattgaaagcaacacccactctctgtactaagtaaggagcttaaaatgtggtatttcgcatggattctgggaacgcttcttgcctgtgcattcgggatcattaccgccctggcgcttgagcacgttgaagcgggtaaaaccggtcaagaagaaagctaatgattcatattgtcgctatgcaatatacaaaatcatttaagttgcatcgcggcggcaaggctgcgaatccccaggagcttacatcagtaagtgactggggtgtgcagccgcagccaacaaagaggcagcttagaggatgaagtatatttatgcggtaatggacaagcgcccgttaagggcgctttccttcgtgatggcgatagtgctggcaggatgtatgttctgggacccgtcacggtttgccgccaggaccagcacgcttgaaatctggcacggattattgctgatgtgggcggtttgcgcaggcataatccacggtgtgggttttcgccctgaatccgtacactggcaagggattttttgtccgctccttgcggatatcgtccttatcgtcggcctgattttcttcttcttgtgaataagaaacctccttaaaaatataggggcttgcataagcccatatatttttactctcccttaacttccccccattcccaagcctcattcccacgcgtatagtagcaacgtttaaaagctctacttttgttgcattaccgggatgtaaagtgaatacaaggcgatatacaacggcattcttgaggcattacggcggcaagcggatgacgccaacaaagaggctgcagggatgaataagtatatgtttcgatggccaattcgagtttattacgaagacacggacgccggcggtgtggtttatcacgccagctatgtcgctttttatgaaagagcgcgcacggagatgctgcgtcaccatcacttcagccaacaggtgctgctggcggagcgggtcgcctttgtggtgcgcaagatgacgctggaatactatgcgcctgcgcggctcgacgatatgcttgaagttcaaacagaaattacgtcaatgcgtggcaccgctttggttttcacgcaacgcattgtcaacgcagagaacacgctgctaaatgaagcagaggttctgattgtttgcgttgatccactcaaaatgaagcctcgtgcgcttcctaagtctattgtcgcggagtttaagcagtgactgacatgaatatccttgatttgttcctgaaggcaagccttctggttaaacttatcatgttgattttgattggtttttcaatagcatcctgggccatcattatccagcgaacgcgtattctgaacgccgctgcgcgtgaggcggaagcgtttgaagataaattctggtccggaatcgaactatcgcgtctgtaccaggaaagccaggggagacgcgatagtctgtcgggctcggaacaaatcttttatagcgggttcaaagagtttgtccggctccatcgcgccaacagccatgcgccggaggcagtggtagagggggcgtcgcgtgcgatgcgcatctccatgaaccgagagctggaaacgctggaaacgcatatcccgtttcttggcacggtaggctctatcagtccttatatcggtctgtttggcaccgtatgggggattatgcatgcgtttatcgccctgggcgcggtgaaacaggcgactctgcaaatggttgcgccgggtattgccgaagcattgattgccacggcgattggtctgtttgccgccatccctgcggttatggcttacaaccgactgaatcagcgcgtgaacaagctggaactgaattacgacaactttatggaagagttcaccgcgattctgcaccgccaggcgtttaccgtaagcgaaagcaacaaggggtaagccatggccagaacgcgtggacgaggtcgtcgcgaacttaagtccgaaatcaatattgtaccgctgctcgacgtactgttggtgctgctgctgatctttatggcaaccgcgccgatcattacccagagcgtggaagtcgacttgcccgaggcgaatcagtcgcaggcggtcagtagtaacgacgatccaccggtcattattgaggtttccggagtagggcaatacagcgtagtggttgataaagatcgaatggatcaactgccgtctgaacaggtgatcgcagaagtaaagcgtcatctgcaggctaatccgaaaacagtctttttaatcggcggcgcgaaagaggtgccgtacgatgaaataattaaagcgctgaacttgttacacagcgcgggcgtaaaatcggttggcttaatgacgcagccaatctgaagtctgcgtcccgttggcttgaaagacggcgagtaacaggcgaacagttttttgggaaccgagagtgtcaaaggcaaccgaacaaaacgacaagctcaaacgggcgataattatttcagccgtgctgcatatcatcttatttgcagtgctgatctggagttcgtttgatgagcatatagaggcttctgccggcggcggcggtggttccgctatcgacgcggtgatggtcgatcctggcgccgttgtgcagcagtacaaccgtcagcaggatcaacaggccagcgccagacgcgcggaagaagagcgtaaaaagctgcaacagcagcaagcagaggagctgcagcagaagcaggctgctgaacaggagcggttgaaacaacttgagaaagaacgtttagcggctcaggagcagcaaaagcaggctgaagaagcggcaaaactggcgcaacagcagcagcaacaggccgaagaagcggcgaaagcggcggcggacgcgaagaaaaagcggaggccgaggcggcgaaagcggcggcggacgcgaagaagaaagcggaagccgaagcggtaaaagcggcagcggacgcgaagaagaaagcggaagccgaagcggcgaaagcggcggcggacgcgaagaagaaagcagaggccgaagcggcgaaagcggcggcggaggcgaagaagaaagcggaagccgaagcggcgaaagcggcggcggaggcgaagaagaaagcggatgccgaggcggcgaaagcggcggcggaggcgaagaagaaagcggatgccgcggcggcgaaagcggcggcggaggcgaagaagaaagcggatgccgcggcggcgaaagcagcggcggacgctaagaagaaagcggctgccgaaaaagcggccgccgcagaaggcgtcgacgatctgcttggcgatctcagctcgggtaagaatgcgccgaaaaccggcggcggcgcgaaagggaatggtcagccatcgaaagatagcggtacatcgggcgctaacggtggggcgacaggcgctgatatcagcgcctacgcgaaacagattcaggtcgccattcagagccgtctgtacgatgcgagcctgtatcagggcaaacaatgtgtcttgcatattagcctggcgccggatggctcattaaaaagcattacgtctgagggcggcgatccggcgctttgtcaggcggcgttaatggcggcaaaaaccgcgaaaattcctaaaccgccaagccaggctgtttatgagaaaataaaggatgccaaactagactttaaactgtagatacttttctttatggaagttagagcagttgagttgttactggtcctggtggttttgtgtatttgagtttgttaacattctgctaaattatcgtgggtcgcaggcccaggtatgggagatatgatgaagcaggcattacgagtagcatttggttttctgatgctgtgggcggcggtgctgcacgcagaagtccgtatcgagatcacccagggggtggactcggcgcgaccgattggcgttgtgccttttaaatgggccggaccgggcgctgcgcctgaagatatcggtggcatcgtggcggcagatttacgcaatagcggtaaatttaatccgctagaccggtcccgactgccgcagcagccagccaccgctcaggaagttcagcctaccgcatggtctgcgctgggtattgatgccgtcgtcgttggacaggtaacgccgaatccggacggttcctacaatgttgcttatcagctggttgacactggcggcgcgccggggactgtactggcgcaaaattcttataaagtgaacaagcagtggctgcgttatgcaggtcataccgccagtgacgaagtctttgaaaaactgacgggcattaagggcgcgttccgtactcgtatcgcctatgtggtacagactaatggcggtcagttcccgtatgaactgcgtgtgtcggattacgatggttacaatcagtttgtggtgcaccgttctccgcagccgttgatgtctccggcgtggtctccggacggctcaaaactggcttacgtgacatttgaaagcggtcgctccgcgctggttatccagacgctggcaaacggcgcagtgcgtcaggttgcgtccttcccgcgtcacaacggcgcgccggccttctcgccggatgggacgaaactggcgttcgcgttatcgaaaaccggaagtctgaacctgtacgttatggatctcgcctccggtcagattcgtcagataacggacggccgtagcaacaatacggagccgacctggttcccggacagccagactctggcctttacctctgaccaggctggacgtccgcaagtgtataaaatgaacattaacggcggtgcggcgcagcgtattacctgggaaggttcgcaaaaccaggatgcggatgtcagcagcgacggtaaatttatggtaatggtaagctcaaataacgggcagcagcacattgccaaacaagatctggtgacgggtggcgtacaggttctgtcgtcaacgttcctggatgaaacgccaagtctggcacctaacggcacgatggtaatctacagctcttctcaggggatgggatctgtgctgaatttggtttctacagatgggcgtttcaaagcgcgtcttccggcaactgatggtcaggtgaaatcgcctgcctggtcgccgtatctgtgataataattaattgattactaaaggaattaaagaaatgcaactgaacaaagtgctgaagggcctgatgattgccctgcctgttatggcaatcgcggcatgttcttccaacaagaacgccagcaatgacggtagcgaaggcggtatgctgaacggcgccggcactggtatggacgctaacggcaacggcaacatgtcatctgaagagcaagcgcgtctgcagatgcagcagctgcagcagaacaacatcgtttacttcgatctcgacaagtacgatatccgttctgacttcgcggcaatgctggatgcgcacgctaacttcctgcgtagcaacccgtcttacaaagtcaccgtagaaggtcacgcggacgaacgcggtactccggagtacaacatctccctgggtgagcgtcgtgctaacgccgttaaaatgtacctgcagggtaaaggcgtttccgctgaccagatctccatcgtttcttacggtaaagaaaaacctgccgtactgggccacgacgaagcggcttacgctaagaaccgtcgcgctgtactggtttactaagagaattgcatgagcagtaacttcagacatcacctgttgagtctgtcgttactggttggcatagcggccccctgggccgcttttgctcaggcgccaatcagtagtgtcggctcaggctcggtcgaagaccgcgtcactcaacttgagcgtatctctaacgctcacagccagcttttaacccaacttcagcagcagctctccgataatcagtccgatatcgattctttgcgcggccaaatccaggaaaatcagtatcaactgaatcaggtgatggagcgccagaagcaaattatgctgcagctggggagcttaaataatggcggcgcagcgcagccagcagctggtgaccagagcggggcggcaaccactgcgacccccgccccggatgccggtacggcaacctcaggggcgccggtacaaagtggcgatgcgaataccgattacaatgcggcaattgcgctggtgcaggataagtctcgccaggatgatgcgattgtggcgtttcagaacttcatcaagaaataccctgattctacttatcagccgaacgccaattattggctgggccagttgaattacaacaagggtaaaaaagatgacgccgcctattatttcgcctcggtagtaaaaaactatcctaagtcgccgaaggctgcggacgcgatgtacaaagttggcgttatcatgcaggacaaaggtgatacggcaaaagcgaaagcagtttatcagcaggtgattaacaaatatccaggcactgatggcgcgaaacaggcgcagaagcgtcttaacgcgatgtaatgcgtaccatgcgaccagaaaacgccttttttctggtcgcgtcgtgcgattcctaagcagttgagccctctgcgtcgaaatttttgttgcgctcaaatctgaaatcagtaatatatgccgccgttgccacgggatattaaacaactcgaaagcaacgcaaaagtgggtcgttagctcagttggtagagcagttgacttttaatcaattggtcgcaggttcgaatcctgcacgacccaccaatcgttcggtggaaacgagaataaaacgtgaaggataacgttgcgtcagcaacggcctgtagggcgaggcgaagccgagtcatcctgcacaccactaacttcggttagtcagtaatatccagcgtagtatcgggtgattagctcagctgggagagcacctcccttacaaggagggggtcggcggttcgatcccgtcatcacccaccactcgggtcgttagctcagttggtagagcagttgacttttaatcaattggtcgcaggttcgaatcctgcacgacccaccaattttctaattggtgccgagtaaaaatatttcaggtagtcccaccgtatgggtcgttagctcagttggtagagcagttgacttttaatcaattggtcgcaggttcgaatcctgcacgacccaccaatatacaaggtggtaactggtagagaacgtgaaggttaacgttgctttagcaacggcccgaagggcgaggcgaagccgagtcatcctgcacgacccaccatcctgaatgattgaagcagtaacccttatccaaggggtcgttagctcagttggtagagcagttgacttttaatcaattggtcgcaggttcgaatcctgcacgacccaccaatgtaaaaaagcgccctaaaggcgcttttttgctatctgcgatatggaagattcgaacctgccgcaggttcgggtctcacgtagtgagacaacggagccgcttgcggcgacggcccgaagggcgagcaaagcgagtcatcctgcacgacccaccaatgtaaaaaagcgccctaaaggcgcttttttgctatctgcaatatgaagattcgaacctgccgcaggttcgggtctcatgcagtgagacaacggagccgtttacggcgacggcccgaagggcgagcgaagcgagtcatcctgcacgacccaccaatgtaaaagagggcgctggcggcgcctttttgctatctgcaatatggaagattcgaacctgtcgcaggttcgggtcttgcctgatgcgctgcgcttatcaggcctacagacggcaccgctcacgtaggccagataagacgttacgccgccatcagatacggggctacgtaattattgtgactttccttattgaatcagctatcttgtttagcatataaaacaaattaaccgattgtggcgtttattacgctttcattcggttgtttcgttaagtcagtaaaacgagaagccacgatgagcgtaatgtttgacccacaagccgcaatctacccgttcccgccgaaaccaacgccgttgaacgacgacgaaaagcaattttatcgtgagaaaatcaagcggttgctcaaagagcgcaatgccgtcatggtggcgcactactacaccgatccggaaattcaacagttagcagaagaaaccggcggctgtatttccgactcactggaaatggcccgtttcggcacgaagcacgccgcatccacgctgctggtagcgggcgtacggtttatgggggaaaccgccaaaatcctcagcccggaaaagaccattcttatgcctaccctggcggcggaatgttcgctggatttaggctgcccaatagacgaatttagcgctttttgtgatgcgcaccctgacagaaccgtagtggtctatgctaacacctcggctgctgttaaagcgcgtgcggactgggttgtgacctccagtatcgccgtagaactgattgagcatctggatagtttgggggaaaaaattatctgggcgccggacagacacctggggaattacgtgcaaaaacagaccggggccgatgtactgtgctggcaaggagcgtgtatcgtgcatgacgagtttaaaactcaggcgttgacccgtttaaaaaaaatctatcccgatgccgctcttctggttcaccctgaatcgccgcagtccattgtcgagatggccgatgcggtgggctccaccagtcagcttattaaggcggcaaaaacgctgccgcacagacagcttatcgtggcgaccgatcgcggcatcttctacaaaatgcagcaggcggtgcctgaaaaagaactgcttgaagcgcccacggctggcgagggggcgacctgccgtagctgcgcgcactgtccgtggatggcgatgaatggcctgaaagccattgctgaagggctggagcagggaggcgcggcgcatgaaatacaggttgatgcggcgctacgcgagggcgcattactgccgctcaaccggatgctggattttgcggctacacttcgggcgtaaagacggaaatctttgggggagagaatggatttttttagtacgcacaacatactgattcatattccgattggcgctggcgggtacgatctctcgtggatcgaagcggtaggaaccatcgccggcctgctctgtatttggcttgccagtctggagaagatcagcaactacttttttggactggttaacgttaccctgtttgcgattattttctttcagatccagctttatgccagcctgttgctgcaactctttttctttgccgccaatatttatggctggtatgcgtggtcgcggcaaacaaaggataatcaagccgagcttaaaatccgctggctgccgttgccaaaagcaatggcatggctggcgatatgtgtgatagctatcggtttgatgacgcgatatatcgatcccgtattcgccgtcctgacgcgcgtggccgtcgccattatgcagatgctggggttacaggtgacaatgcccgtactgcaaccggacgctttcccgttctgggactcttgcatgatggtgctgtctatcgtggcgatgattctgatgacacgcaaatatgtcgaaaactggctcctgtgggtgataatcaacgtgatcagtgtggtgatttttgctttgcagggcgtctatgcgatgtcgctggaatatctgatcctgacatttatcgccgtgaacggtagccgcctgtggataaacagcgcgcgggagcgaggatcgcgcgcgctttcccgttaatggtgatgaacatgcccggacgatgtctgattcagatgacagtccgggccgtgacacacttgatactccatctgaatcgtagcgtgcgcaatatggtattcgtgcatcaggaaatcctggatacgttccagcagcgcatcatggtcgtgtggcggaatgacctgagcgtgcaacgtcatgaccggtttttcgccgaccatccagacatgcacatggtgtacgttgcggacttcggggatttcccgacttaaatggcgctgtaaggcattaatatccagtgaaaccggcgcgccttccagcaattcgttgacgctatcttttaacaaacgccaggcgctgcgtagcaccagtaccgaaaccagaatagagagaatcgggtccgctggcgtccagcctgtccagataatgatcaacgcggcgactattgcgccgacggaacccagcaaatcgcccatcacatgtagcgcggcagcgcgcacgttcaggtttttttcatcgcttccccgatggagaatccagaacgcaaacaggttcgccagcagacccgcaaccgcaatcaccatcatcagattgcccgccaccggacgtggcgtgtaaaagcgctctatcgcttcccagacaatgagaagggtaatgaccaccaacgcaatggcattcacaaaggccgccagtgtggtgagtcttagccagccaaaagtgtggcgaacagtcgggggacgacgggaaaattgaaccgccagcagcgcaaagagaagggccgccgcgtcggtgagcatatgtcccgcatccgccaacaacgccagagagccggagagtatcccgcccaccacctcaaggagcataaatccggcagtgacgataaaggcgaaaagcaggcgacgagcattattatctttcggcaggtgtgaatcggcatgagagtgtgagtgcgccataacgtcattcctttgttattctcatcaatactgtagacatcatactgatttttcgctgacaaaataaaaaggagagcgaaagctctcccgttatcagacttttttttgcattactgtgtggtaccgtcggttttggtattcacgtcattattgacgccattaccggtttccacttttttattaatatccgggcagcgaccgtctttacacatggtatttttatgctcttcatccttggtcattccgtcatgattcatggttgaaccgtctggatgctgcatcgtgctgttagtattgccgttggtattgatgtcgttgttattcacatcattcggcgctacattctggcgggcgtccggggcaacctgaccggcatttgccgccgagttcgcctggccattactggattgcgcgttagattcagcagctaacgctgcgccgctggcaaggccgagggtagcggtcagtaaaagcgtagtcagttttgtcattttcataagatgctcctgttatggtggatatgtcggataacctcttccaacagtgcacgtgtcagtcaaatcctcaaataagggataaaaagcgttcgccgccgcgggttaacgcagcagagaatcttgcaataattcataaacagagtggttacagttaaaaagtgtagattagatcccatttttcgctacatttgtgcgtttttttcctgaattccaggattattccgttcaaagtgtaaaagcccgtttacactatttaattgaagagatagattggagggattgcattcattgggataagtacggcaacactggaataaacatgaattatcagaacgacgatttacgcattaaagaaatcaacgagttattacctccggtcgcgctgctggaaaagtttcccgccacggaaaatgcagcaaataccgttgctcacgcgcgcaaagccatccataaaattctcaaaggcaatgacgatcgtctgctggtggtgatcggtccttgttcaattcatgatccggcagcggcgaaagagtatgccgcccgtttgctggcgctacgcgatgagcttcaaggcgagcttgaaattgtcatgcgcgtctattttgagaaaccgcgtaccaccgtcggctggaaagggctgattaacgatccgcacatggataacagcttccagattaacgacggtctgcgtattgcgcgcaaactgctgctggatattaacgacagcggcctgcctgccgccggcgaattcctcgatatgatcacgccgcaatatctggccgatctgatgagctggggcgccattggcgcgcggactactgaatcccaggttcatcgcgaattggcgtctggcctctcttgtccggtcggttttaaaaatggtactgatggcacgattaaagtcgccattgacgccatcaacgccgccggcgcgccgcattgcttcctctccgtcactaaatggggtcattcggcgattgtgaataccagcggcaacggcgactgccatatcattctgcgcggcggtaaagcgccaaactatagcgcgcagcatgttgctgaggtgaaagaaggcctcaccaaagcgggactgacgccgcaggtcatgatcgatttcagccatgccaactcctgtaagcaatttcaaaagcagatggaggtttgcgccgatgtctgccagcagatagcgggcggtgaaaaagcgattattggcgtgatggtagagagtcatctggtagaaggaaaccagagtctggaaagcggtcagccgctgacctacggtaaaagcattactgacgcctgtattggctgggaagataccgatgcgctgcttcgtcagttgtcggcagcggtaaaagcccgtcgcggctaagtttagtttctatcctgtagtgaagtgcaggatagaaaacatattggtccggtaacagcctaccggaccggtattaccaatattaatgtattattatttggcgtacttaggtacttcctgcttctggagagtatttccttccgaatcaattcctacaatgactctatagcggtcaaaatataacttcttaatggattctgttcctaattcttcgtaggcaacaatttctactgatttaacatgttttgtattaattgcagacgctcctccaatcccgagtagcgaaaccccaccgtattttttacaaagctcagcgacataatcagcacgatcgcctttgccaagaaacgcagttgccccttgttgaaacatcatttctacaaatgggtccatacgcgcggccgttgtaggaccgttggagccaataggtaaaccaggtctggcagggcaggggccagcatagtaaattgtttggttttgaaaatcgactggtgatttttctccgttactaagcgctacttcgatttttttatgcgcggcgtcacggcaggtgtaagcaaatccagtgagaaataatatatcgccgaccttaagagttttcgctttctctttagtcaatggtaatgttaattccatcatagcttctccaggtattaaatgatttcactagcgtggcggcttgcattacattggaaattgattgcgactggcagtgcagtgatatggcaaggatagtaatcgacatgcacgcctaacgccgtaatacgcccgcccatacctaaagggccgatccctgtattattcacggcctctaataattcagcttcgagctgggcataaagtggtttagcattgaactcaccaagagggcgtaataatgctttcttcgccatccacgaacagtgatccattgtaccgccaacgccgataccaataatataaggagggcatggattgcctcctacacgacggacagtttccagaacaaaatcttttataccatcaataccatcgccgggaagcaatgttttaaaagttcccatattttcgctaccgccgccctttggcataacggtaattgtcactcggtcaccatcaacaatttcagtatgtaaaattgcaggagtattatcattagtattaatacgttctaatggatctgcaaccatggattttcttaagtatccattttcatagccctggcgaacaccctggttcacctgatctttaagcggcttaccttcccagcatacatgttgtccaatttccattataacgatacaagtgccggtatcatggcagcatgcaagttgttctttttttgcatactctccattatcaattaatatcttaatggtttccttgccgatctttgactcttctttatcatatgctttacgaaaagaacacatgagattatcatccagttcataacaagctttttttacaagtttttcgataatcggaatgataatttctgtatttaatatacgactcatactccctccagtgctatgttgcattgttttatccattgatcacattttcatgatattcgtattcattgtaggaaggaaatatgttatttttattaaatgataaattttatttatagtagtggaaaatagatggaaattagacaattagaatattttgtaagcgcttctttgttaggtaacttaaccagagttgctgagcggcattttgtttctcaacctaatatcaccattgctattaagaagttagagactgaattaggggtgacattatttgatagaaagaaaaataaacttgtccttactgaggagggcatgtttttcttacaaaaaattgaacctatccttattgcgttaaaaaatagcgtagcggaaatgaaagattatcgtaatgaaaatggtggcatagtaactttggggatcccaccgatgataagtttgtttcttttttcaccgctcttcaagcatttccgagagatttatccagagatggaactctctcttgttgaagaggggacttttggtttacatgataaactttctgctggagagctggatcttgctattgttattattaatgactgtccaaaagaattagttacggtaccattaatgactcagcagcacgtggtatgtatgtcagataaacatcctctggcaaaaaaggatagtatcgattgggaagatctacaatatgagccattgatactaatgaaaaaagattcctggcatagaaaaacgattattgaagaatgtacaaagcgaggaattcatacacatatttttctatcatcaaacagggttcaaaccaacatagatctggttgctaaaaatgaaggaatttctttcattttggacgctgtcgatcttaaagccgaaaaagtaataaccaaggccatgactgagctgacttatgttacgattggtttggcctggaagaaagataaatatttatcatatgcaaccagagcgttaattaaattcattgaggattatattaaagaacattttacaattaaataattatatttgttcttcaacaaaaatttcccatagctcttcggcatctggaggcattctcttggctggtctataaagtcttatttctatgggtacccataaattactttctttttccgctgcagtaacaatagttttagcctctatatcttgcctggcaaggctttgaggtatccaggcaacaccatcgccagatctgaccattgccaatagtgttgctgccagatcggccacaaaggcaacatttatattatgggtaattctgttaatagacgctgtatttgctattattcttcccagacctgattgtgatgaaaaagaaaggtaagggaattgaatcttattatttatattccacaacggttttaacgtttctgagtctggtttactgaatggaattaatgtatcaaacccaagacgaatgctcataaagttatttttatttaaatttagatgcatatgtgggtgatggtgacacagcaaaaattgtgaatctccctgccgcatcattttttcgcacgcattcaatgagtcagataaaagacgaaatgaaccaaattttgcaattttatcactctgttttaacaaatgcggtacaaaagagaaagacaaagcatgcgttgctgaaaaaacaagactgggttgtttattacctgcggcctcaagggtatcacttttcaatgtgtacaaggagtggatcagttcgggaagctggtctgtaaatacttctccggccttggtaagggtgactccccgtttacttctttcaaaaaggggcgtacccacccattcttcgagagattgtatccgacgactaaatgcgggttgagtcacatatcttgaggcagacgcttttgagaaattcaacgtttcttttagagccagacagtcttcgagccatgttagttcgaggtgatgccgatattgcataagctgcaaccttattagcattggatgagtttcatttatataagtagcattatacacagacagattttaagaggaaattatttgattaaacagaaacaaaagcagtaagaatatgttatgcctttgtcgggtaagtgttgttatttatgtgagtgtattctttctcaatagaaattaattagatgtaattttagtataacatgtgatttatgcttgttgcagttgtattcatgactgtaatgagttgtttttgtaccctaataatataaggacgtatacatgtcaccagcgattattactttgttggttttagtggttgcaataattatctttgttagcgatcgtcttcctatgggattagttgcatttatggtcccaatggcactttattttaccggtgttatcgatgctaaggatatttttgcttcaatcgtaaatgcgaatgttattcttatcgtcgccatgtgtgtactcggtgcggcattttttaaaacaggtttggcatggcaatcaagtaaaattttactaaaatatgctaaaacagaaagaagccttagtgtattgatttttcttattggtggagttatgtctgcctttgtttctaatagcggaacagttgctgtgctaattcctattgttttaggtattgccgccagtagtcagattaagcctattaaacttcttatgcctctggtttttggggcaacaatcggtgctgatatttctattatcggttcgccaggaaatctgattgctaaaaatactattgaaacttttagtaagggaagtctgtcggtgccatttttcgaatacgctaaaattggtattcctttgctgattgcatgctctatatttctctatttcttcggttcaaaactcatcgcagatcgtgatggaaatacacaatctgattctcaaatggattatagccaaattccggcctggcatagaaatttaactttagccgtttttattctgtctatcgctggaatggtggcaactgattatattaagtttctgcctccaatgcatattattgcgtgttgtgcggctattgttcttgtatttgctggcgttttgacacaaaaggaaacttttaattcttttgaaacactaactgttttcatgcttgcgtttatgatgcctttaggagccgcgcttaattctactggtgctggagaaatgattgctaatgccgttatttcagtaaccggagattctggcgttatgattattatggcgtcattgtggatacttacatgggctttgactcaagttatgagtaacactgcagcatgtacgttgttatgcccggtaggatggactatcgcacagtctattggcgcagaccctcgtgcagttgttattgctgtttttattgcgagtagtgttgctgtttgtaccccaatggctattccagcaaactcaatgattattggcccggggaatgttaaatttaaagattttttaaaacccggattggcgattagtttggtttgttttatcgttagtatgattttactaccgatattttatcccttctattaatgcctgatattacttttctattttagattattaaatttgagactttattatgaatagttcggtgctattaggtgaaggcttcaccctgatgttcctcggcatggggttcgtgctggcgtttctgttcctgctgattttcgccatccgcggcatgtccgccgccgtcaaccgcttcttccctgaaccggtcccggtaccgaaggcggcacccgccgccgcgcccgcggacgacttcgcccgcttaaagccggtgattgccgccgctatccaccaccatcgccgccttaacccttaattcacggaggaatccatgaccgttgccattaccgatgtcgtcctgcgtgacgcccaccagtctctgttcgccacccgcctgcgccttgatgacatgctgccgattgccgccgcgctcgatgacgtgggctacgggtcgctggagtgctggggcggcgccacctttgacgcctgtatccgctttctcggcgaagacccgtggctgcgcctgcgcgagctcaaaaaagccatgcccaaaaccccgctgcagatgctgctgcgcggccagaacctgctcggctaccgccactacgccgatgacgtggtggaacgcttcgttgagcgggcagtgaaaaacggcatggacgtgttccgcgtcttcgatgccatgaacgacccgcgcaatatgaaagccgccctgcaggcagtacgcagccacggcgcgcacgcccagggcacactctcctacaccaccagcccggcgcacaccctgcagacctggctggatttaaccgaacagttgttagagaccggcgttgactcgattgccatcaaggatatgtccggcattcttacaccgatggcggcgtatgagctggtcagcgaaatcaaaaaacgttttgaggtgcgcctgcacctgcactgtcacgccaccaccgggatggcggagatggccctgctgaaggctatcgaggcgggcgtcgacggcgtggacacggcgatttcctccatgagcgccacctacggccacccggccaccgaagcgctggtggcaacgcttgccggcacggaacacgacaccgggctggatatcctgaagctggaaaatatcgccgcgtacttccgcgaggtgcgcaaaaagtatcacgcctttgaaggccagctgaagggctacgacagccgcattctggtggcccaggtgccgggcggaatgctcactaacctggaaggccagctgaagcagcagaacgcggcggacaaactggaccaggtgctggcggaaatcccccgcgtgcgcgaggacctcggctttatcccgctggtgacccccacctcgcagattgtcggcacccaggcggtgctcaacgtgctgacgggcgaacgctacaagaccattgccaaagaaacggccggcattctgaaaggcgaatacggccacacgccggtgccggtgaacgccgcgttacaggcccgcgtgctggaagggggcgctccggtgacctgccgcccggcggatttactcaaaccggagctggctgaactggaagcggacgtcaggcgtcaggcgcaggagaagggcattactctggcgggaaacgccattgacgacgtgctcaccgtggcgctgttcccgcagattggcctcaaattccttgagaaccgccacaacccggcggcgtttgagccactgccgcaggcggaagccgcgcagccggtggcaaaagcagagaagcctgcagcttccggtatctacaccgtggaagtggaaggcaaagcctttgtggtgaaggtcagcgacggcggcgatatcagccagcttactgcggctgttccggcagcctcttccgcaccggttcaggctgccgctcccgcaggcgccggcaccccggtcaccgcgccgctggcgggcaacatctggaaggtgattgccaccgagggccagacggtggccgaaggcgatgtgctgctgattctggaagccatgaagatggaaaccgaaattcacgccgcgcaggccgggacggtacgcggtatcgcggtgaagtccggcgatgcggtctccgtcggcgacaccctgatgacgctggcgtaaggacgaggagcggaaatggaaagtctgaacgccctgcttcagggcatggggctgatgcaccttggcgcaggccaggccatcatgctgctggtcagcctgctgctgctgtggctggcgattgcgaagaagttcgagccgttactgctgctgccgataggcttcggcgggctgctgtcgaacattccggaggccgggctggcgctgaccgcgctggaaagcctgctggcgcaccacgacgccggacagctggcggtgattgccgcgaagctgaactgcgcgccggacgtgcatgccattaaggaagcattagcgctggcgctgccgtcggtgcagagccagatggagaacctggcggtggacatgggctacacgccgggggtgctggcgctgttctataaagtggcgattggctccggcgtcgcgccgctggtcatctttatgggcgtcggcgcgatgaccgacttcggcccgctgctggccaatccgcgcaccctgctgttgggggcggcggcgcagttcggcatcttcgccaccgtgctgggggcgttgacgctgaactacttcggccttatcagcttcaccctgccgcaggcggcggccatcggcattatcggcggcgcggacggcccgacggcgatttatctgtcgggcaagctggcgccggagctgctgggggccatcgcggtggcggcgtactcgtatatggcgctggtgccgttaatccagccgccgattatgcgcgcgctgaccagcgagaaagagcgcaaaatccgcatggtgcagctgcgcacggtgagtaagcgggaaaaaatcctcttcccggtggtgctgctcatgctggtggccctgctgctgccggacgcggcgccgctgctggggatgttctgttttggcaacctgatgcgcgaaagcggcgtggtggagcgcctgagcgacacggtacagaacgggctgattaatatcgtcaccatcttcctcgggctgtcggtgggcgcgaagctggtggcggacaagttcctgcaaccgcagacgctgggcattctgctgctgggggtgattgcgtttggtatcgggacggcggccggggtactgatggcgaagctgctgaacctgtgcagtaagaacaaaatcaacccgcttatcggttcggcgggggtgtcggcggtgccgatggcggcccgcgtatcgaacaaggtgggcctggagtcggacccgcagaactttctgctgatgcacgcgatgggcccgaacgtggccggggtgattggctcggcgatagccgccggggtgatgctgaagtacgtgctggcgatgtaaatctgttcctttcccggaggcggcgcgttgcgcctgtccgggctaccggattgcatggatctgtagcccggacagatgcgcagcatcgtctccgggaatgtcccataaggagactttgatgaatgaaaccatagcatttcgtccggaaggccgggcatcgataaaagatgtggttgtcaattatacgctggcatcactggacgagcttgaacaactgcacccggcgctgaatctgctggcgcacccgtcaattgtccgtggcagccatgatttctttgtccgttgttatgacgcgggcgtacagcatgcgcaggccggggcggctgaaacggtagcggttttgcctgattcgctgccacaagaacggcaaaggagcgggctgctgtgtgccgcagcaggtcgtctggatgccctgcgccagccgctgacgcacaatcgtttatgtgacctggccagtcagttctgtgctggcatggcagatgttgacagcgaaacccgcagcggtttttataccgtgcgcagcatatcgctgccggtttaccggcggctgttgcgggatcaacattctcacggtgtctgcctgcagcaggctctgctgcacctgctggcctggaagagcgattctccctgggcgcggcagcaggcgcagcggctgctctggcagggcggcgtgctgggcgataaaggtgagtttgcgcttatgacgctggatgatgaactgcgggagcgccagattgggtggcccgggctgtggtcgctgctggccgtcaccgggtttctggcgaaattccctgccggaccgatatttgctgactgaaaaatgaggactgctgacaattatctgttgtgttggcatttctgcgagaggcagctagcgctttgcctgacttacgaaacgagaatatcaacagattacgtactttttgtaggtccgtggttggaacattgccacctggttacacgttgtcagcagcctcaagcgtggatggctccacgctgtctttgtctatggaaaacccccagtcaggccctgtctcttgatcaggagatctgatcaagagacagggctatgccggaggatatttattggaaaccgatgagataggccaccgtgtcattaatcgaaatataaataaatatataacgaaataattcggcgctataattctcctctgattaataacgtagcccgaaccatgacctgtcaggacaaatcacttttagcccccgctctcgcttccacgcccgtcattccgcgctatcgccagatcatacgcaaacgggctgtgctcatgttagctattgcgttggcgatgatggcttcactgatggtggatgtaacctgtgggtcttctggtttaccgctcagtgcgctatggcaggcgctttttcaaccggaaaaagtgaatgcgggcatacacgttattgtctgggatattcgtttaccctatgccctgatggccctactggtgggcatggcgttagggttagcgggcgccgaaatgcaaaccattttaaataatccgctggcgacgccgtttaccctcggcgtatcgtccgcggcggcttttggcgctgcgctggcgattgtgttggggatcggtattcccggtattcctgccgcctggtttatcccggccaatgcgttcatctttgcgctgttatccgcgttactcctggacggtattacccgttggacaggcgtcgccgcatccggagtggtgttgtttggtattgcgctggtattcacctttaacgcgttggtcgccattatgcagtttgtggctgatgaagatacgctgcaggggctggtattctggacgatggggagcctggtccgcgcgtcgtgggaaaaattgggcgtactggccgtggtgtttattgctgtgcttttttgcgcgttacgaagcgcctggcaactcacggcattacgtctgggcgaagagagggcgatgagctttgggattcatgtccgccgtttacgcctgctgtcattgttgcgtatcagcttgttatcagcgctggcggtagctttcgtcgggccgattggttttattggtctcgttgcgccgcacattgcgcgaatacttttgggggaagatcaccgtttctaccttccgggcagcgtgctgataggcgggctggtgttatcgctggcctctattgcggcgaaaaatagtattccgggcgtcatggtgccggtggggattgtcacctcgctggtcggggttccgttctttttaagcattgtattgcgacatcgggggagtctctgatgcgcgggttaatgctccgctcatttagcgccggctattccactcagccggttattgcagatctcaacgttcccttactgccgcgcgggaaaattaccattttgctggggccgaacggctgtggtaaatcgacgttactacgttcgctggccgggctgaataacgccgacggcgaggcgctgcttgatggcgaagatctcatgtcgttatcgtttgccgagcgggcgcagaaagttgtgtttttgccgcagtcattaccgcagggcgtacatctgcatgtactggagtcgattatcgtggtactgcgggcatcaggcggcagagacaatgcgcagggcagagcgcagatactggctatccttgagcaattgggcataacgcatctggcgttgcagtatctcgaccagctttccggcggtcagcggcagttagtgggtctggcgcaatcgctgattcgtcgccctgaacttctgttgctggatgagccgctcagcgcgctggatttaaactatcagtttcacgtaatggatctcgtgcgtcgggatacccaggcgcaaaatagggtaacgatagtcgtggcgcatgacattaatattgcactgcgtcatggtgaccatgtcctgatgctaaaagacggcaggctggtcgccagcggcgcgccggagacggtgattactgcggagcgtctggctgaagtgtaccgggtacgaggacgcgtggagcgctgttcgcaggggaaattgcaggtggtgctggacggcgtgatcgctgtttaagacatattgcctgatggcgctgcgcttatccggcctacccattgctcgtaggccggataaggcagttataccgccatccggcaaaggtgattacttcgctttaccctgattcgccacggcagccgctttcgcggcgatttcgtcagcgttgcccagatagtaatgtttgagcggcttgaagttttcgtcgaactcatacaccagcggcacgccggtcgggatgtttaactcaaggatctcatcttcactcatgttatccaggtatttcaccagcgcacgcaatgagttaccgtgagcggcgatgatcacgcgctcaccgctcttcatacgcggcaggatggtgtcgttccagtaaggaataacgcggtcgatggtcagcgccagactttcggtcaacggcagctctttctcgctcagtttggcataacgtggatcgtgacccggataacgctcatcatctttggtcagttccggcggcgtcacggcaaaaccgcggcgccactgtttaacctgctcgtcaccatatttttctgccgtttccgctttattcagcccctgcaacgcgccatagtgacgttcattgagtttccaggatttttccaccggcagccacgcctgatccagttcatccagtacgttccacagcgtatggatagcgcgtttcagtacggaagtgtaggcaaaatcaaagctgaaaccttcttcttttagcagtttacccgctgcttttgcttcgcttacgcctttttcagacaggtcaacatcataccagccggtgaaacggttctctttgttccattgactttcaccgtgacgtaccagaaccagcttagttacagccatactctcactcctataaatcatatgtaatgataataattctcattatattgccgcgaggtgttggcggcaatgcttacgcataaccatagcgaaaatagtggcgcagtgtaaggttcttgtgaattcagagttgcgattttgtctttaagtggtggaggtttgagcagggcaatggcgcgtaggcccgataagcttgcgtcatcgggcatgtagcggcatatcgttagaacggaataaactgatactcggtcaggctggcgtactcctcgccagggcgaaggatacagtcaggctgcggccattcaggatgattcggactgtccggcagcagttcgctttccagcgccagcccttgccagtcggcataaggttccggcccgcgggaaggtgtacccgccagataattgccggaataaaactgtagcgccggggcggtggtgtaaaccatcatttgtagctttccatcctgtgaccacagacgggccgccggctttttgccatcaccctgcgtctgtagcaggaaagcatgatcgtagcctttaaccttgcgctgatcgtcatcggcgagaaattcactggcaatgacttttggcatccggaagtcaaacgaggtattggctaccgattttagcccctggcgtggaataccggattcatctaccggcagatactcatccgccagaatttgcagcttatgctggcgcacgtcggtccgatcgccgtccagattaaaatagacgtggttggtcaaattcaccggacagggtttatcgaccgttgcccggtaggtgatggagattctattgtcatcggtcagacgatattgcgccgtggcgcaaagatggccgggaaaaccctggtcgccgtcatcagaggtgagcgcgaataatacctggcgatcgttctggttcacaatttgccagcggcgcttgtcaaagccttccggtccgccgtgtagctggttctcgccctgacttgggcttaactgtacggtttcgccggcaaacgtatagcggctattggcgatacggttcgcgtaacggccaatagaggcgccgaggaatgacgtctgttcagggtagtgttccgggctggcgcagcccagcaatgcttcccgaacgctgccgtcagacagcggaatacgggcggaaagaagagtggctccccagtccatcagcgttaccaccatccctgcgctgttgcgcagggttagcaggcggtacggttgaccatcgggggccagtgcgggcgtttcatttagcactgtcctgctccttgtgacggtttgcatacataaaaggtttctttgattccggttttcgcttcgtactgttgcgcaacggcctgccgaacagcgggaaccagatcttccgggatcagtgcgacaacacacccgccaaagccgccgccggtcatgcgcacgccgcctcgatcgccgatggtcgctttgacgatgtctaccagcgtgtctatctgcgggacggtaatttcgaaatcatcgcgcattgaggcatgggactccgccatcagttggcccatacgttgcaaatcacctttctccagcgcgcttgccgcttcaacggtgcgcgcattttcgctcaatacatggcgaacgcgttttgcgactaccgggtccagttcgctggcaacggcattgaacgcctcaaggctgacatcgcgcagggccggctgctggaagaaacgggcgccggtttcgcactgttcacggcgggtattatactcgctgcccaccagcgtgcgcttaaagttactgttgatgatcaccacggcgacacctttcggcatggaaaccgctttggcgccgagcgtacggcaatcaatcagcagcgcatgatcttttttgccgagcgcagagatgagctgatccataatgccgcagttacagccgacaaactggttctcggcctcttgtccgttgagcgcaatttgcgcgccgtccagcggcaggtgataaagctgctggaagacggtgcccaccgccacttccagcgaggcggaggagcttaacccggcgccctgcggcacattgccgctgatgaccatatccacgccgccaaacgcgttgttacgctgctgcaggtgtttcactacgccgcgcacatagttagaccactgctggctatcgtgggtcacgatcggcgcatccagtgaaaattcgtccacctgattgtcgtaatcggcggcaatcacccgtacggtacgatcgtcgcgcggcgcacagctaattacggtctggtaatcgatagcgcagggcagaacaaaaccatcattgtaatcagtgtgctcgccgatcagattgacgcggcctggcgcctgaatcgtgtgggtagcagggtagccgaaaatttcagcaaacagcgcgcgcgttttctctttcagattcatttttatactccggattcgcgaaaatggatgtcgctgaccgcgcgcaggcgttcagccgcttgttctgcggttaaatcacgctgggtttccgccagcatttcatagccgaccataaatttacggacggtcgcagagcgcagcagcggcgggtaaaagtgtgcgtgcaactgccagtgtgcgttttcttcaccgttaaacggcgcgccgtgccagcccattgagtaggggaaggaacactgaaacaggttgtcataacgactggtcagctttttcaacgccagcgccagagagtcgcgctgctcgtcgcttaaatcggtaatgcgcaggacatgcgttttgggtaacagtagcgtttcgaacggccacgccgcccagtaaggcaccaccgccagccagtgttcggtttcgaccacggtgcggctgccgtccgccagttctcgctggacataatccaccagcattggcgagcgctgctcggcgaagtaggctttttgtaaacgatcttcgcgttcggcctcattcggcaggaagctgttggcccagacctgtccatgcggatgcgggttcgaacagcccatcgccgcgcctttattttcaaagacctgcacccacggataggttttgcctaactcggcggtctgcgtctgccaggttctgacgatttccgtcagcgcgggcaggctcaactccggcagcgttttactgtgatcgggagaaaagcagatcacgcggctggtgccgcgcgcgctctgacagcgcatcagcggatcgtggctgtccggcgcatccggcgtgtcggccatcagcgccgcgaaatcgttagtaaagacgtaagtccctttgtaatcgggatttttatcgccggtgacacgcgtattgcccgcacacaagaagcagtccggatcgtgggccggcagcatttgctgagacggcgtttcctgcgccccctgccaggggcgttttgcgcgatgcggcgaaaccagaacccactggccggtaagcgggttataacggcgatgcggatgatcgatgggattaaatggggtcataacaacgtccttaatctgggtatccctgcggatggcgtgactgccagtgccaggtgtcctgcgccatttcgtcaagcgtgcgggtgacgcgccagttcagctcgcgatcggctttgctggcatccgcccaatacgccgggagatcgccgtcgcggcgcggcgcgaagtggtaattaatgggtttaccgcaggctttactaaaggcgttgaccacatccaggacgctactgccgacacccgcgccgaggttataaatatgtacgccggatttgtccgccagtttttccattgccacgacgtgcccgtcggctaagtccataacgtgaatgtaatcgcgtacgccggtgccatcctcggtcgggtaatcattgccgaaaacggcgagcgattcgcgacgacccacggcgacctgggcgatatagggcatcaggttattcggaataccttgcggatcttctcccatgtcgcccgacgggtgcgcgccgaccgggttgaaataacgcagcagcgcaatactccactccggctgggctttttgcagatcggtgaggatctgttctaccatcaatttacttttgccgtaggggctttgcggcgtgccggtaggaaaactttcgacgtaagggatcttgggctgatcgccataaacggtggcagaggagctaaaaataaggtttttaacgttggccgcacgcatggcgctgaccaaccgtagcgtaccgttgacgttgttgtcatagtactccagcggcctggcgaccgattcgccgacggctttcaggccggcaaagtgaatcacggtatcaatcgcgtgatcgtgcagaatttcggttataagcgcttcgttgcgaatatcgccttcgacaaaggtcgggtgcttaccgcccagacgttcaatcacgggcagcacgctgcgcttgctgttgcagaggttatcgaggatgacgacgtcatgaccattttgcagcaactgtacgcaggtatgacttccaatgtaaccgctaccacctgtaaccaatactctcataattcgctccgttaagcctatggtatggaataaccatagcataacaaagatgcgaaaagtgtgacatgtaataaattagtggaatcgtttacacactggtgattttacgcatttgtatcgattaaatgattacaaatcatctggcttgagaatgcttctgctttttatccgaaaaaaaggcgcgttacgcgcctgggaatgaaacggacggggcaagagctgtcagtcttttttacgcgagagtagcttcctggcgagcgccccgacagcgacgacgccgatggcggtcactttccagaatttaagcaacgcgataccgagcatagcaagcagtcctactttcttggccgcgataccgccaatcagcgcggcgagcccatactccgctattttgtccgttgattcgttgaagtcagcgtagcgttgtccagcgttgaacttgacggaactgagaattcttttcgccagagggatttcgtggtcaacagaacctctgtcggtcaccagatttaaagaaaaatagccttcacgtcccagcagataggtgttgtagttcacgccttgttcattcagtggttcgttggtgccgatatcctggatggcggcggaccagatcagacgatgattggttgcatcgtaggtaggcttctcgatccagccaataatttctatcggctcaatgccttttgcaatacgatctttattcgcttcttttgtgcctttgcgcaggttatccattaattcatcggcatcccagttttttgcatcatcatcttttacataaccagaatcatcatattcgatagaaataaatccattcatttcctttttaaatacgaggccgtaaaaaatattcatcgtcaacatagttaccaatttcacgcataaataccgccgcttcttttgcgggtatccaggtaaatccttccggcagattaagcgtggctttatcacctaaactaatctttgtcggacccgcaacggcggcgcgactcatgccttcaacagcgacctcaacagcggttttacgcgcttcctgcgcagcggtcggcttttgctcagcataactgctggggcaaaataaaatagctgccagtaaaaatagtattatttgtggaaaacgaaaagccataatgaatcccttatattcacatacgacatcattgtcgaaaatttcaggattattatgacaatgaggcggtcagcgattcaagagatagtaagcttatcgaccgttattattattcttaataaaaggagagtggttccagaatggcgcgcggcgccattctgataatacatttaattattgcatcgtccggaaacgtacttataacgttcgccctctggtacaaattccagccggtgggtaatacaggcaggcgcatcctctgcatgatgggaaacgaacagcagttgggtctctccctggcgaattaatacatctacaaaacggcgtaccagttggcggttcagcgggtccaacccttgcagcggctcatccagaatcaacactgtcggatgcttaaccagcgcgcgcacgattagcgccagccgctgctgtccccaggagagactgtggaagggggcatccgccgtacgcttatcgattcccagaatatccagccactgttgcgccagttttcgttgcctgtctgaaacggcctggtaaatgccgatagaatcgaaatagccggagagaatgacattgcgtaccgtggtactgacgcggtaatccagatgtaaactgctgctgacgtagccgatatgttttttgatatcccagattgtttcgccgcttcctcgccgccgcccgaacagcgtaagatcgttgctgtagccttgcggatgatcgccagtaataaggctaagcaacgtagacttacccgctccgttaggaccgacgatctgccagtgttcgcccggattgactcgccagcttaagtggtggaggatagggcgatcgttatacgagactactccatcgttaagtacgatccgtggttcgccatcgggtaacgcatggcgggcggaaggttcgtccggttcgggtaattgtacgtcggtcagacgctcgctgtgcgcgagttgagcaaccaacgcccgttgcagcaactccgccgtcgttccggtctccgccagcgtacagtcggcaagcacgccggcaaactgcacgaagtccgggatctcatcaaaacggttgagtaccagcgccagggtcatacccgcctggttcaacgccgtcaggcgttgcgccagttgttgacgggcggtcacgtcaagcccgtcgaacggttcatcaaggatcaataactctggctcagacatcagcgcctgacacagcagcgcttttcgcgtctcgccggtagaaaggtatttaaaacgcctgtcgagtaaagcggaaatgccgaactgctgcgccagtatcgcacagcgggcaggatggtgaacatcatcctgaataatttccgcggtagtgcgcccggtatcgtcttcgccaggactgagcatatcggtgttattacgttgccactcatcgctgaccagcttttgcaattgttcaaaggacagacgagtaatgcgggtaaaccgacactggcgctcgcctgttaataacggcagttcgcccgccagcgcgcgggcgagcgccgacttcccgctcccgttagccccaacgaatgcccagctatcgcccgcattgagcgtcagcgaatccagatgaagtgtttttgtatcgctcagacgaaacgtgccttgcgaaatttgcaacgatgacattttgcatcccattttttgcagcgatgaatgacagggatacgtctttcggcaacggatgtcaatgtgcttagcacaacgttgcaataatcactctgtccgcattaaaccaggcaatcacgtcatcgccttcctttaacgtggcggcatctgaagtcggtatcgtggcgcacagcgtctggccgtccggcagcgccatcaacacttcacactgttccgcgccgcgctcgatatggctgatcgttcccgacaactgattgtcagcggcgcgcgcaacggctgcatcccgggtaatgccaacccacggcgcttttagcaggatcagcacttcttttccctcctccaggccgagacgctcgccgctttgcgccgtcagcgcgactttgagccgcgttttgccgtcggccagcagcacgtcgacatgctgttgcaccagatcgcgatcgcgggcggtaatggtgccgaaccactgatttcgggcgctggtttgcagtgaaaagcgggagatagcggccagcagactgtcaagcggcagggcgtcatcgtcgcttaacacatcgaacgctttttgctgaatttggcccagcaaatcgtaaagctggatcagacgctggccatagcgggttaataccgcgccgccgccgcctttgccgcccgttgcgcgttcaaccagcatatgttcgctaagctggttcatgtcgtttatcgcatcccaggcgctcttatagctgattcccgcgtctttcgcgccctgactaatcgagccggaaagcgcaatgtgtttcagcagagagatacgtcggggatcggcaaaaagcttttgctgaagtttcagggtaagaaggatttcggcctgcataaccagctcctggtaaaaagactattgtgactgaaaagcgcgtcagcgcaaagccgaccgcacaaaaggggagtgcttttctgtgtgatgcggttaaaatacaaaaaggactatatctggagttgcccatgttagagttattaaaaagtctggtattcgccgtcatcatggtaccggtagtgatggccatcatcctcggtctgatttacggtctgggtgaggtgttcaacattttttccggtatcggtcagaaagaccagtccagacagaaccgctgatttccccaaacgcccgctcagtcgggcgtttttgttactcaagatcctgcttttcctgccgatattttctgtgtttaatcgttaatgggtatgaataaccgctgggaaacccctgagattatcgttatattatcgtttacataacgaaacgcacaaggagttacagatggcgcattcctggttacgcctggtcgcaggggcaacattatctttcgtcatcgccggtcatgcgctggcggatgaaggcaagatcaccgtatttgccgccgcgtcgctaacgaacgcgatgcaagacattgcggcagaatataaaaaagagaaaaatgtggatgtggtctcctcattcgcctcctcttcaacgctggtgcgccagatagaagcgggcgcgccggcggatctcttcatctctgctgatcagaaatggatggattacgcagccgataaaaaagcggtggataccacgacgcgcgaaacattgcttggcaatagcctggtggtggtagcgccgaaagccagcgagcagaaaccgtttaccatcgacaacaaaacggactggattcgtctgctgaacggcggacgtctggcggtgggcgatccgcaacacgtaccggcgggaatttatgccaaagaagcgctgcaaaagttgggcgcatggcaaacgcttgaaccgaaactggcgccgggcgaggatgtgcgcggcgcgttggcgctggtcgaacgtaacgaagcgcctttgggcattgtatacggttctgatgcggtcgccagcaagggggtcaacgtggtggcgacgttcccggaagattcacataaaaaagtggaataccccatcgctatcgtggaggggcataaaaatgcgaccgtcagcgcgttctatgattacctgaaaggaccgcaggcctcggcaatctttaaacgttatggatttacgacgaagtaatgatactgaccgatccagaatggcaggctgtccttcttagcctgaaagtgtcttccctggccgtgctgtttagcctgccgtttgggatcttttttgcctggttactggtgcgatgccggtttccgggcaaagccttacttgatagcgtcctgcatctgccgctggtgctgccgccggtggtggtcggctatctgctgctggtgtcgatggggcgacgcggatttattggccagtggctgtatgactggttcggtctcacgtttgcctttagctggcgcggcgccgtgctggcggcggcggtgatgtccttcccgctgatggtgcgggccattcggctggcgctggagggggtggatatcaagctcgaacaggccgccagaacgctgggcgccgggcgctggcgcgtttttctgactatcaccttaccgcttaccctgccaggcattattgtcggtacggtgctggcgtttgcccgttcgcttggcgaatttggcgcgaccattacctttgtttccaatattccgggcgaaacccgcaccataccttccgccatgtataccttgatccagacgccgggcggggagagcgcggcggcgaggctgtgcgtgatttcgattgtattagcgctgatttcgctgttgatttctgaatggctggcgcggattagccgtgaacggacggggcgctaaccatgctggagcttaatttttcccagacgctgggaacgcactgtttaaccctcaacgaaacgctgccagccagtgggatcacggctatctttggcgtctccggcgcgggaaaaacctcgctgattaatgccatcagcggtttgactcgcccgcaaaaaggacgcatcgcgctgaatggccgggtgttgcatgacgcggaaaacggtatctgtttaacgccggaaaagcgccgcatcggttatgttttccaggatgcgcgcctgttcccccattacaaagtacgcggcaatttgcgctacggcatggcgaaaagcatgaccggtcagtttgataagctggtgtcgctgctgggaattgaagcgttgcttgatcgcctgccggggagcttgtccggcggagaaaaacagcgcgtagcgataggccgggcattgctcaccgccccggagttgctgctgttggacgaaccgttggcctcgctggatatcccgcgtaaacgcgaattactgccgtacctgcaacggctggcgcgggaaatcaatattcccatgctgtatgtcagccattctctcgatgaaattctccacctggcggataaagtcatggtgctggaggatggacaggttaaagcgtttggcccgctggaagaagtctggggaagcagcgttatgcacccgtggctgccgaaagagcaacagagcagtattctgaaagtcagcgtgctggagcatcacccgcattatgccatgaccgccctggcgcttggcgaccagcacctgtgggtaaataaactcaatcagccgctgcaatccacactgcgtattcgtatacaggcgtcggatgtctcgctggtactacagccgccgcagcagaccagtatccgcaacgtattgcgggcaaaagtggcgaattgttatgacgataacgggcaggtggaagtccagcttgagataggcggcagaacgctgtgggcgcgaataagcccgtgggccagggatgagctgaatatcaagcctggcctgtggctttacgcgcaggtgaaaagcgtttctatcaccgcctgactatagcaggtgggtgtaaataaatttggcgatgctatcggtagtgttatcgccgatcacaacgtcagcgcgcgctttcaccgcctcatcggcgttgcccatcgcaacgccggtgcctgccgcctccagcatactgatgtcgttgtagttatcgccgaaagcgatcacatttttcattgaccctccctgcgcttctatccactgggtaaggcgcttgcctttactgttgcctttgcgcgcgatatccacctgatcgtgccatgaccattcgcactccaggccaagcgcctgttcaacatgctgaccgaaccgctgtagtctgggaatatcttcatcggtaagcgcaaacttccacacggcattcacgtcgcgcgccgcctgcgctaacgaagagacctgtgtaaaggtcggacgttgttccggcggcaaggtctgcgcccaccgggaggtacgcacgacgtggccggttgggtgttcgtaaagcatagcgtcatcaacatacatcaggccgtgaatctgatgctcatccagtaaatcaatcaactgcaacgccttatccacgggcataggatcggcatccaggacagttttagcttgataatcatacaaataggtgccgttgcagcaaatagcaggtgtttccagcgccagcgcctgataaaaaggatgaatagcaacgtgatggcgaccagtgacaatgataagttgaaagcccgcctctttggcgcgtgatagcgcttcaagcgaggaggggagtaaggttttatgcggggttaataatgttccgtctaaatcgagggcaatcacgcgtgcagtcataattttttccagattaagagtaataattccgtctgtcggcatggtacaccgggacggtaagcagacaaaattctgcgtctgaattcagcattcgccgtcaaaagcgactacgttaagctgtgtcctgttattgcagctacatgccatatgcaaaggagtattcatgaaacaaacagtctataccgccagccctgagagtcagcaaattcacgtctggagcctgaaccacgaagggacgctgacgctggtgcaggtcgtggatgtgcccggtcaggttcagccgatggtggtcagtccggataaacgctacctctatgtcggcatgcgcccggagtttcgtgtcctggcgtatcgtattgcgccggatgatggcgcgctgacgtttgccgccgaatccgccctgccgggtagcccgacccatatttctaccgatcatcatggtcgttttgtctttgtcggatcgtataacgccggtaatgtcagcgtgacgcgcttacaggatggcctgccggttgagctggtggatgtggtggaggggctggacggctgccactcggcaaatattacgccggataaccgtaccctgtgggtgcctgcgctaaaacaggatcgcatttgtctgtttacgctaagcgatgacggccatctggtggcccaggagccggcggaagtaaatacagttgaaggggcaggcccgcgtcatatggtcttccacccgaatcgacaatatgcgtattgcgtcaatgaactgaacagttcggtggatgtctggcagcttaaaaatccgcatggcgagatagagtgcgtgcaaacgctggatatgatgcccgccgatttttccgatacccgctgggcggcggatattcatattacgccggatggacggcatctgtatgcctgtgaccgcaccgccagtctgattaccgtctttagtgtctccgaagatggcagcgtactgagcgttgaaggcttccagccgacggaagcccaaccgcgcggctttaatatcgacaatagcggaaaatacctgattgctgcgggtcaaaaatcacatcatatcgcggtctatgaaattacgggcactcaggggttgctgacggaaaaaggccgttatgccgtcggccaggggccaatgtgggttgtggtgaacgcgtactaaagcgctgtgtgccggatggaggcgggctggagctcatcaaggcgggatgcctgattaatttcaataaacattgcttgcagtaaaaccacgggccgccacatctgctgcggcggcccgtttataagcctgaaccggaacggtgattactgcttaggttccgccactactttactgcctataccgcggttgttgtattcccacatgcggttgtagttagtgtcgttcagattacgctgcacctcgtctttgtcatccacggttcccgtatttccagcaaacggacgtttcgagatgaccgcgtcggcccacggtttggcaacgttgaagccctcgttaatcacgctgtcgcggatcacgacctgaccgttggtgttggcgtcgacatccagcgagcggccaagctgcgcaacgccatcgccggaggcgttaaagcggctgttgatcgccaaaaagccatagtaaatattggacagcgtcgccggggcgaagacgtaggcttcctgctgtgtgcgggagttgacgacctggaagttggtgttatcgaacaccacggcgccgcgtccggaaaccatatccacatcgccttcaatatagctgttcgtcaccagcgtacgtggctggcgatcggtttgcagacggttctgcacgccgctgttggtcacaaagaaggtgttctggcggccaaggatattgaccttgttaatctggactttgtcgccatcggtacgcagcgccaccgccggatggtttccggcatcgacgctgtcgcccagcgtgttctcgatggtcagattttgtagctgcagaccgttattctgcgaccagaacgcggcagaacacattacaccgatcgtcgcggcgtgtttgctttggcagttatcgaacatataccaggcgggtttaccaggcatatatttcccgccgggattcaccgcgcggcgccagtcagcgacactcatttcaccatcaatcgccatcccaattttcacatcgatcggtttttcaccggtcccgtacagggtcagacttcccggcgcggcgggaacatacacggtcccctgatagtcgcccggcataatagcaatgtactggcgtttgttcgtgcgtttaaccattgccgcatcgaccgcggcctgaatcgaggtgtgcgtaacgcctggcgtacctgccggccccaccacaaagtcaggctgtgcgggcagggtaatcggcgacggcgaccacggggcggtattcggcgtcagggaggcaaaatagcgcgccgcaacgaagtttttcgcttcatttgccgacagaattgggcgcgaggcggtgccaggcgcggtttgatcggaagggatctgatcgggtggcgtagagctacaggcgctcagcgtcacgccaaaagccagtgccagcgccagacgggaaaccgataatgtattcacaggttgctccgggcttgaaaaagttaaatgacatccattgaagcctgcttttttatactaagttgaacgaaacgggaaggcgaaaaggtaaaaagttccttttcaggccggaaacacctgtagcatcagatagttttatcacaattaagcaacaactttcgcgctttgagttgacaatccggagcagaaagaaaataaatgtctatacaacccatgacaggcaagagagcgacaggaatgcggcaacttttaccgggcgatactgtctggcgaaacatcaggctggcgacaatggacccgcagcagcaagccctgtacgggctggtggataatcaggcgctgattgtgcgcgaagggcatatttgcgatatcgtgccagagacgcagcttcctgtcagcggggacaatatccatgatatgcagggacgactggtaaccccgggacttatcgattgccacacgcatctggtgtttgccggtaaccgcgccgcagagtgggaacagcggcttaacggcgcgtcataccagcatattagcgctcagggcggcggcattaacgcgacggtatcagcaacccgcgcctgtgcggaggagacgctctacctgctggcgcgcgaacgcatgatgcgccttgccagcgaaggcgttacgctgctggagattaaatccggctatggtctggagctggcgacagaagaaaagctgttgcgcgtcgctgcaaaacttgccgccgaaaacgctatcgacattagccccacgctattggccgctcatgctacgccagcggagtatcgtgacgacccggacggctacatcactctggtctgcgagacgatgattccgcagctctggcaaaaagggttatttgatgcggtagacctcttttgcgagagcgtcggctttaatgtggcgcagagtgagcgcgtattgcagacggcgaaggcgttaggtattcccgttaaaggccatgttgagcagctttcgctgttgggcggcgcgcagttggtgagccgttatcagggcttatcggcggatcatatcgaatatcttgatgaagtgggcgtcgcggcgatgcgtgacggcggtactgtcggcgtattattgcccggcgcgttttattttctgcgcgagacgcagcgcccgccggtagaactgctgcgccgctatcaggtgcctgtcgccgtcgccagcgatttcaatcccggcaccagcccgttttgcagtttgcatctggcgatgaatatggcctgcgtacagtttggtctgacgccggaagaggcatgggcgggcgttacgcgccatgccgctcgcgcgctgggaagacaggcgacgcatgggcagatcagggccggctaccgggcggattttgtggtgtgggatgctgaacagccggtagagatagtgtatgagccggggcgtaaccctttatatcagcgggtatacagaggaaaaatctcatgacgcaatggtatccggcttctccggcgctctggcaggggcgcgatgacagtatagaagcgccggatgcgcggcgtctgtttcagaccgtcacgcgcagcgagaccttttcccccgaaaactggcagcaaaagatcgcgttaatgggatttgcctgcgacgagggggtaaaacgcaatgcagggcgtcccggcgcggcaggcgccccggacgcgttgcgtaaagcgctggcgaatatggccagccaccagggacatgaacggctggtggatttaggcaattgggttgcgccgacgcccgatctggaaggcgcgcagcaggccttgcgcgatgcggtaagccgctgtctgcgggccgggatgcgcacgctggtactgggcggcgggcatgaaaccgcgtttggacacggcgcgggggtgctggacgcgtttgcgcaggaaagcgtagggatcattaatcttgatgcgcatctggatctccgtcagaccgaccgggcaacatccgggacgccgtttcgtcaactggcgcagctatgcgacgcgcagagccgcgcgtttcattatgcctgtttcggcgtgagccgtgcggcgaatacgcaggcgttgtggcgggaagcgcagtggcggaatgttaccgtggtggaggatctggactgccatgacgcgctggcgcagatggcgcagtttatcgacaaggtggataaaatttatctgactatcgatctcgacgtattgcctgtctgggaaatgccggccgtctccgctcccgcagcgctgggcgtgccgctgatacaggttctgcgtttaattgagccggtttgccgcagcggaaaattacaggcggcggatctggttgagtttaatccacgctttgatgaagatggcgcagcggcgcgcgtggcggcgcggcttggctggcaaatcgcgcactggtggcgttaatctgtcatccggaaaacattatccgcataaggaaggcttcacgcatgtattcatcccgctcccgttctgcacctgcgcctttttacgaaacggtgaaacaggacatctgtaaaaaaatagccggcggcgtctggcagccgcacgatcgcattccgtcggaagcagaactggtcgcccagtatggctttagccgaatgaccatcaatcgggcgctgcgtgagctgacggatgaagggtggctggtgcgtttacagggcgtggggacgtttgtcgccgaaccgaaaggccagtccgcgctgtttgaagtccgcagtatcgccgaggagattgccgcccgccgtcatcagcatcgttgtgaggtgctcacgctggagcgcgtgcgggcaaacgccatccaggccagcgctctcaacgtcaatgagagcgatgtcattttccattccatcatggtgcattatgaaaacgatctgccggtacaaattgaagatcgctgcgtgaatgcggatattgccgtggattacctgacgcaggattacagtcagaccacgccgcacgcttatttgtcgcggatcgcgccgctaacggaaggggaacatattgtggaggcggtgcgcgccacggcgcaagagtgcgcgtggttaactatcaaagagcatgagccttgtctgctcattcgtcgtacaacctggtccgcgtcgcggattgtttctcacgcccgcttacttttccccgggtcgcgctaccggctacagggacgatttatctcctgagcggactgctgccggaaaacgtgattgctgacacaatataacaaaattgtatcatttttgttaattctattcttgtgcttacttgtatagacaagtatatgtctgattcttatctgtgggtctgcggcggtgcctgatagtggcgttttagcgttatttggcgatggcagaccgataataatgaggagtcattgctatgcctgaaagcaagtatcgtcagcagactatccgcgcgcccagaggcacggtattaacggcgaaaagctggctgacagaagccccgctgcggatgttaatgaataatctcgatcctgacgtggcggaaaatccgcatgagctggtggtctacggcgggattggtcgcgccgcgcgcaactgggaatgctatgacgctattgttgatgcgctcacccggctggaggcggacgaaacgttgcttattcagtctggcaaaccggtcggcgtatttaaaacgcacgacaacgcgccgcgggtattaatcgccaactccaacctggttccccactgggcgacatgggaacattttaacgaactggatgcgaaagggctggcgatgtacggtcagatgacggccggaagctggatctatatcggcagtcagggaatcgtgcagggaacatacgaaacctttgtcgaggcggggcgtcagcactataacggcacgctggcgggacgctgggtgctgactgctgggctgggcggcatgggcggcgcgcaaccgctagccgcgacgctggccggagcgtgttcgctgacgattgaatgccagcaaagccgtatcgattttcgtctgcgtactcgttacgtggatgagcaggccgccacgctggatgacgcgctggcccgcattacgcgctacacccgcgaggggaaagccgtgtccgtcgccctgtgcgcgaacgcggcggatatcctgccggaactggttaatcgcggcgtgcgcccggacctggtgaccgatcagaccagcgcccacgatccgctacatggctatttaccctccggctggcgctgggaggagtatcagaaaaacgcgcaatccgatccccacgggacgatgcaggcagcgaaacgttccatggcggcgcatgttcgggcgatgctggcgttcagtaaaatgggcgtgccgacctttgactatggcaacaatattcgtcagatggcgaaagagatgggggtggaaaacgcctttgattttccgggatttgtgccagcctatattcgtccgctgttctgccgtggcatcgggccgtttcgctgggtggcgctgtccggcgatccgcaggatatctataaaaccgatgccaaagtcaaagagatagtggctgaggataaacatctgcatcactggctggatatggcgcgcgagcgcattcattttcaggggttaccggcgcgtatctgctgggtaggcctggagtggcggcaaaaactggggctggcgttcaacgaaatggtgcgttgcggcgaggtatccgcgcccattgtgattggccgcgatcacctggattccggctctgtcgccagccctaaccgtgaaaccgaagcgatgcgcgacggttccgacgcggtttccgactggccgctgttaaatgcgttgctgaataccgccagcggggcgacatgggtatcgctccatcatggcggcggggtgggaatggggttttcgcaacacgccggtatggtgattgtctgtgatggcactgacgaggccgccgcgcgtattcgccgcgtgttacacaacgatccggcgacgggcgtcatgcgccatgccgatgccggatatgatctcgcggtggaatgcgctgttgagcaaggtctgaatttaccgatggttgcggcgacgcaggggaaaggctgatatgaacaccatgacactcactccggggcagttaagtctctctcaactgtacgatatctggcgtcatccggtacagcttcggctggacgccagcgccattgacggcattaacgccagcgtcgcgtgcgtcaatgatatcgttgccgaagggcgtaccgcctacggcatcaacaccggtttcggcctgctggcgcagacgcgcatcgctgatgaagacttgcaaaatctacagcgatcgttggtgctgtctcacgccgcgggcgtaggcgacccactggatgacgcgatggtgcgtctgatcatggtattgaaaatcaatagcctggcgcgcgggttttccgggattcggttgagcgtgatagaggcgctcatcgctctggtgaatgccggcgtgtatccgctgattccggcaaaaggctcggttggcgcgtcgggcgacttagcgccgctggcgcatctgtcgctgacgctgcttggcgaaggaaaagcgcgctggcagggcgaatggcttccggcgcagacggcgctaaaaaaggccggactggagcctgtcgcgctggcggccaaagaggggctggcgctgcttaatggcacccaggcatcaacggccttcgcgctgcgcggtttgtttgaggcacaggagttatttgcctccgccgttgtctgcggcgcgctgactaccgaagccgtactgggatcgcgccgtccttttgatgcgcgcattcatgccgcgcgcggacaacaggggcaaattgacgtcgcgcggttgttccggcacctgctgaccgataccagcgccattgctgaatcacatcaccactgtcataaagttcaggacccgtattcccttcgctgccagccgcaggtaatgggcgcttgtctgacccagttacgtcagacgaaagaggtactgctggctgaggccaacgcggtatccgataatccgctggtctttgccgatgcgggggaggtgatctccggcggtaacttccatgctgaaccggttgccatggcggcggataatctggcgctggcgatagcggaaatcggcgcgctatcggagcggcgcatcgcgctgatgatggataaacatatgtcgcagttaccgccgttcctggtgaaaaatggcggcgttaattccggttttatgattgcccaggtcaccgccgcggcgctcgccagcgagaataaagcgctggcgcacccgcacagcgtggatagcctgccgacctcggcgaatcaggaagatcatgtctcaatggccccggcggcagggcggcgactctgggaaatggcggcgaatacccgcggcatcattgccgtggagtggctggctgcctgtcaggggatagatttacgggaagggttaacctccagcccgttactggaacaggcgcggcagacactgcgcgagcaggtggcgcactatacgcaggatcgttttttcgcgcccgatattgagtgtgcgacggcgctgctggcgcaaggcgcgttacagcgtctggtgccggactttatgtgaatgctgccggatggagcggcgcttattcggcttacccaacccgttggcagggtaagacgtttacgccgccatccggcacagcgtttaactgaacatcgccgtgatcgaggcgctggcgagcgaatggaaatgcacgttaaagccgaccatcgcgccgctggcgtcttcatcaacgtcaagacgctcgacgtccagcgcgtgaaccgtaaagatatagcggtgcgtttcccctttaggcggcgccgcgccgccgtagcccgctttaccgaaatcggtacgcgtctgaatgacgccgtctggtacggccaccaggcctgagccgaacccctgggtcagtacgcgcgtatccgccgggaggttcaccaccacccagtgccaccagccggagccggtcggcgcgtcgggatcgtaacaggtcacgacaaaacttttggtgcccatcggcacgttgtcccaggccagatgcggcgaaatattatcgccatcatagcccataccgttaaaaacgtggcgatgaggaagtttatctccatcgcgcaaatcgttgctgataagtttcatgcgctctccttttgactcaccagaagtgtagccagaagcagcatcgcttaccgctgattaatggctaaaaaatgtttcattgtgtaccgcgtcattgaccgcctgggtcaaacggcgcagttgatccggacgaataatgtagggcggcatcaggtagattagcttgccgaacggcctgatccagacgccttgcccgacgaagaagcgttgaagcgccgccatattgaccggatgcgtggtttcaaccaccccaatcgcgcccaatacccgcacatccgccacccagggcgaactttgcgcgggggctaactcagcgcgtaactgagactcgatagacgccacctgctgacgccattcgccgctttccagcagcgtcaggttggcgcaggcgacggcgcaggccagcggattccccataaacgtcgggccatgcataaaacaccccgcctcgccgttgctaatagtctctgcaacctggcgtgtcgtgagcgttgccgagagggtcatggtgccgccggttaaggctttgccgagacacagaatatccggcgcgatcccggcgtgctcgcaggcgaacagtttgccggtacggccaaacccggtggctatttcatcggcaatcagcagaatgccttcgcgatcgcacatgttacgaatacgcctgagccattgtggatgatatatgcgcatcccgcccgcgccctgaacgataggttccagaatcacggcggctatttcatggcgatgcgcggccatcaggcgggcaaatggcgcgatgtcgctttcatcccattcgccatccatccggctttgcggcgccggcgcgaacagattttccggcagatagcctttccacaagctgtgcatggagttatccggatcgcacaccgacatcgcgccgaacgtgtcgccatgataaccgtggcgaaacgtcagaaaacgctgacgcgattcgccgcgcgcctgccagtattgcagcgccatcttcatggccacttccaccgacaccgacccggagtcggccagaaagacacactccagcggctcaggcgttatcgcgaccagcttacggcacagattcaccgcaggttgatgggttatgccgccgaacatgacatgcgacatggcgtcaatttgcgctttcatcgccgcgttcaattgcgggtggttataaccatgaatggccgcccaccaggaggacatcccctcaatcaggcgtttgcccgaggcgagaaccagctcgcagccttcggcccgctcaacgggatataccggcagcggcgaggtcatggaagtgtaaggatgccaaatatggcgtttatcgaaggccagatcgtccgttgtcataatcgacttgtaaaccaaattaaaaagatttaggtttacgagtctacaccatatcaaaaacaaacaacatattttggagaagcccgatggctcgccacccacgctggacactgtcgcaagtaaccgaattatttgaaaaaccactgctggaattgctgtttgaagcgcagcaaattcatcgccagcatttcgatccgcagcaggtacaggttagtacgctgttgtcgatcaaaaccggcgcctgcccggaggattgtaaatactgcccgcagagctcgcgctataaaaccgggctggaagccgagcgtttaatggaagtagagcaggtactggactccgcccgtaaagcgaaaaacgctggttcgacccgcttctgtatgggggcggcctggaggaatccgcatgaacgcgatatgccttatctggagaagattgtacagggcgtcaaagcgatggggctggaaacctgtatgacgctcggcatgttgaacgagagccaggcgcagcgtctggctaacgccgggctggattactacaaccacaacctcgatacctcgccggagttttacggcaatatcatcactacccgtacctatcaggagcgcctcgacacgctggaaaaagtccgtgaagcagggattaaagtgtgctccggcggcattgtgggtctgggcgaaacggttaccgatcgcgccggactgttgttgcagttggcgaacctgccgacaccgccggaaagcgtgccaatcaacatgctggtgaaggtaaaaggcacgccgcttgcggataacgatgacgtggatgcgtttgattttattcgtactatcgccgtggcgcgcatcatgatgccgacctcatacgtgcgtctttccgcagggcgtgaacagatgaacgagcagacccaggcgatgtgctttatggccggggcgaactcgattttctatggctgcaaattgttaactacgccaaatccggcagaggacaaggatctgcagttattccgtaagctggggctgaatccgcagcagaccagggtgctggcgggcgataacgagcagcagcaacgtctggagcagacgctgatgacgcctgacaccgatgattattacaacgcggcagccttatgagttggcaacaacgcgtcgacgatgcgctgacggcgcgtcgggtgacggatacgttgcgccgccgctatgtggtatcgcagggtaccggacgctggctggtagcgaacgggcgacagtatcttaacttttccagcaatgattacctcggcttaagtcaacatccgcagattattcgcgcctggcaacaggcagcgacgcgttttggcgtcggcagcggcgggtcgggtcatatcagcggttattccgtggcgcaccaggcgttagaggaggaactggcgcaatggttaggatatccacgcgcgctgctgtttatctctggctttgcggcgaatcaggcggtcattaccgccttaatgaaaaaaaatgaccggattgtggccgacaggttgagtcatgcttccctgctggaggccgctaatctgagtccggcgcagcttcgccgctttatccataacgatacgcagcatctgtcgcgtttactgcaatcgccctgcgtgggtcagcaactggtggtgacagaaggtgtatacagcatggacggcgacagcgcgccgctggcggaaatccagcacattgcccgcaggcatcatgcctggctgttggttgatgatgcgcacggcatcggcgtgactggcgatgaggggcggggcacctgctggctgcggggggtgaagcctgagttgctggtggtgactttcggtaaggggtttggcgtcagcggcgcagcggtgctctgctcggaaagcgtcgcggattatctgctgcaatttgcccgtcatctggtttacagcaccagtatgccgcccgcccaggcgcaggcgttaagcgcctcgctggcggtgatccgtagcgatgaaggtggtgaacggcgcgaaaaactcgccgctctggttcagcgctttcgggccggcgttaacgcgtcccgatttacgctactgaatgcccatagcgccatccagccgttaatcgtgggcgataacagccgtgcattgcgcctggcggaggcgctgcgtcaacaaggatgctgggcgacggcgattcgcccgccgacggtgcctgtcggcacggcgcgcctgcgcttaacgttaacgcaggcgcatgaagcgtgtgatatcgaccgtctgctggaggtgctgcatggcgcaggtgaataagcaggctattgcggcggcgtttggccgggccgcatcgcaatatgaacagcacgcctctttgcagcaacacagcgcggatgcgctgctgacgctgttgacaggccgccagtttgccagtgtgttggacgcaggctgcggccccggacgtatgagtcgttactggcgagagcgggggagcgaagtgaccgccctggatctttctctgccgatgctgcaacaggctcgcgatcgtcaggcggcgcatcactatttgctggcggatatcgaagcgattccccatgacgccgaagtttttgacctggcctggagcaacctggcggtccagtggtgtggcgatttacgcgatgcgttgagcgagttgtatcgggttgtacggcccggcggcgtggtggcgtttaccaccttgtgccaggggtcgttgccggagctgcgtcaggcatggcaggccgtcgataatcgcgctcacgcgaatagctttttgccggaagaggccattgaccacgcgctgcgcggctggcgggcgtttcgtcatactcaggcgatgacattgtggtttgaggatgccctgagcgcaatgcgctcgcttaaaggcattggcgccacccatcttcatgaagggcgggagtcggatgtattaacccgcgcccggcttagacagattcaactggcatggccgcagcggcaggggaaatatccgctgacgtaccatctttttatgggagtgattgaacgtgactaaacgctattttgtgaccggtactgatactgaagtcggtaaaacggtcgccagttgcgccttattgcaggccgcaacgcagttaggttatcaaaccgtaggctataagcccgtcgcttccggcagcgaaatgacaaccgacgggctacgcaatagcgatgccctggccttgcagcgtaacagcagcctgccgcaaccttattccgctatcaatccttatacttttgccgagcctacctctccccacatcgttagcgccgacgaaggccgggcgatagacgcggcggtgttatcacgcggattgcgaacgctggaggcgcaggcagactgggtgttgacagaaggggcgggcggctggtttacaccgctctctgccacgctgacgtttgccgactgggtacagacggagcagctgccggtgattctggttgttggcgtcaagctgggctgtattaatcacgccatgctgacggcgctggcggtagaacaggccggattaccgcttgtcggatggatagccaacgacatacagccgccaggcgcgcgtcatggtgaatatctcgcgacgcttcgccgcgtcataccggccccgctattaggggaaatcccgtggctgggcgtttctccatcgcaggcggcgacaggacagtatctggaccttagccccctggaacgcgcctgactgcgcttaaaaactgccttcttgcaggatcagacgatcctgctgttttttcgccagaccttcctgacgtcgccatgctaaaaatgtgcaaaatgtgagcgtctacgcctcaatttttcccttctcgttagccaataatctgccaaaaatagcgataatttttttttatcgcccggcgaaaacgtcaggagctgattttgccaggcggcaggggatacgggctggaagcagttatccactattcctgtggataaccttgtgtattagagttagaaaacacaacgtaagcgagaggcgacgcggcctgcgactaaattggcgcgaaagacggcttgagaaaatatcccttttcagacagcaagttatataaaatcaatggttgtaaaggaagggggatacgttgacataaaactttcatcatccgacttgacaaatgttaaaaaagactctggtctggggataaccagcacactgctggaattttaccccgcgactgtctatgttttacctctaaatagcgtggggtatctgccgatagccattatacactggagtgttactgttttttcatccagtattttttattggcaatattcaccgtcgagagtaaaattacacccctgcccgctcactccttcaggtagccgctcatgagtaaaccgttcaaactgaattccgcttttaaaccttctggcgatcagccggacgctatacgtcgtctggaagaggggctggaggacgggctggcgcatcagacgttattgggcgtgaccggctccgggaagacattcaccattgccaacgtcattgcggacttgcagcggccaacgatggtgcttgcgcccaataaaaccctggcggcgcagctctacggcgaaatgaaagagtttttcccggaaaacgcggtcgagtatttcgtctcctactatgactactatcagccggaagcgtatgtgccaagctcggatacgtttatcgaaaaagacgcttcggtaaacgaacatattgagcaaatgcggttgtcggcaacgaaagcgttgcttgagcgacgcgatgtcgtggtggtggcttccgtgtccgcgatttacggtctgggcgatccggatctctacctgaaaatgatgctgcatctgacggtgggaatgctgattgaccagcgcgcgattttgcgtcggctggcggaattgcaatacacccgtaacgatcaagcttttcagcgtggtacctttcgcgtgcgcggcgaagtgatcgacatcttcccggctgaatctgacgacatcgcgctacgcgttgagctgtttgatgaagaagtggaacgcctgtcgctgttcgacccgttaaccgggcaggtagagtcaacggtgccacgttatactatctatcccaaaacgcactacgtaacgccgcgcgagcgtattctgcaggcgatggaagagataaaagatgagctggcggacaggcgtaaggtcttgctggcgaataataagctgctcgaagagcagcgattaagccagcgcacgcagttcgatttagagatgatgaacgagctgggctactgctcaggcattgaaaactattcccgctttctgtcgggccgcgggccgggcgaaccgccgccaaccttgttcgattatctgcccgccgacggactgctggtggttgatgagtctcatgtcaccatcccgcagataggtggcatgtaccgcggcgaccgggcgcgcaaagagacgctggtcgagtatggcttccgtctgccttcggcgctggataaccgtccgctgaagtttgaggagtttgaagccttagcgccgcaaactatctatgtttccgccacgcccggcaactatgagctggaaaaatctggtgatgaggtggtggatcaggtcgtgcgaccgaccgggctgctggacccgattattgaagtgcgtccggtggcgacccaggtggacgatctgctgtccgaaattcgtcagcgtgcggccattaatgagcgtgtccttgtcactacgcttaccaaacggatggcggaagatttgaccgaatatctggaagagcacggcgagcgcgtgcgttacctgcactcagatattgataccgtggagcgcatggaaatcatccgcgatttgcgtctgggcgagtttgacgttctggtggggattaacctgctgcgcgaagggctggatatgccggaagtctcgctggtggcgattctggacgccgataaagagggcttcctgcgctccgagcgctccctgattcagaccatagggcgcgcggcgcgtaacgttaacggtaaagcgattctgtatggcgataaaatcacgccgtcgatggcgaaggcgattggcgaaaccgagcgacgtcgcgagaagcagcagaagtacaacgaagagcacggtatcactccgcaggggctgaacaaaaaagtggtcgacatcctggcgctggggcagaacattgcgaaaaccaaagcgaaggggaaaggcaagggccgttctacggcaaaagccggaattgtcgaactggatatgacgccgaaagcgttgcagcagaaaattcatgaactggaagggcaaatgatgcagcacgcgcaaaatctggagtttgaagaagccgcgcaaattcgcgaccagttgcaccagttacgcgagttgtttatcgcggcgtcctgacaatgtgtcgatcgccagcgagtcatcgttaccatggctcgcttttgagaatttcagtgcaatagtaagggctaagtcagtcaggaatgaaaaacagtgacaggctttgactaacgggattgtcgaaaaactcaaaacatcaatggggtagctagtttaatcacaactgaagaaaattagcgttgaggctgaacccaacgctaattttccctctctcctcggctatgaaaaaaaacgccccgtattatcggtatagctatccttatgatcgtcattttaatcttatatgagttcgttgaaagcgtgtcatggcaacagattacatcattctacttaaaaaagaggtgatggaagcgcgagcatctataagtcaagcgctgcaaatactgaatgatttgtccgaaataatgacgactgtgacctcttatttaaagttgagaatatccttatctgttactttaggttacgttcagatcaggtagggaaaatatgtttaatattactaatatacaatctacggcaaggcatcaaagtattagcaatgaggcctcaacagaggtgcctttaaaagaagagatatggaataaaataagtgcctttttctcttcagaacatcaggttgaagcacaaaactgcatcgcttatctttgtcatccacctgaaaccgcctcgccagaagagatcaaaagcaagtttgaatgtttaaggatgttagctttcccggcgtatgcggataatattcagtatagtagaggaggggcagaccaatactgtattttgagtgaaaatagtcaggaaattctgtctatagtttttaatacagagggctataccgttgagggagggggaaagtcagtcacctatacccgtgtgacagaaagcgagcaggcgagtagcgcttccggctccaaagatgctgtgaattatgagttaatctggtctgagtgggtaaaagaggcgccagcgaaagaggcagcaaatcgtgaagaagccgtacaacggatgcgtgactgcctgaaaaataataagacggaacttcgtctgaaaatattaggacttaccactatacctgcctatattcctgagcagataactactctgatactcgataacaatgaactgaaaagtttgccggaaaatttacagggaaatataaagaccctgtatgccaacagtaatcagctaaccagtatccctgccacgttaccggataccatacaggaaatggagctgagcattaaccgtattactgaattgccggaacgtttgccttcagcgcttcaatcgctggatcttttccataataaaattagttgcttacctgaaaatctacctgaggaacttcggtacctgagcgtttatgataacagcataaggacactgccagcacatcttccgtcagggattacccatttgaatgtgcagagtaattcgttaaccgctttgcctgaaacattgccgccgggcctgaagactctggaggccggcgaaaatgccttaaccagtctgcccgcatcgttaccaccagaattacaggtcctggatgtaagtaaaaatcagattacggttctgcctgaaacacttcctcccacgataacaacgctggatgtttcccgtaacgcattgactaatctaccggaaaacctcccggcggcattacaaataatgcaggcctctcgcaataacctggtccgtctcccggagtcgttaccccattttcgtggtgaaggacctcaacctacaagaataatcgtagaatataatcctttttcagaacgaacaatacagaatatgcagcggctaatgtcctctgtagattatcagggaccccgggtattgtttgccatgggcgacttttcaattgttcgggtaactcgaccactgcatcaagctgtccaggggtggctaaccagtctcgaggaggaagacgtcaaccaatggcgggcgtttgaggcagaggcaaacgcggcggctttcagcggattcctggactatcttggtgatacgcagaatacccgacacccggattttaaggaacaagtctccgcctggctaatgcgcctggctgaagatagcgcactaagagaaaccgtatttattatagcgatgaatgcaacgataagctgtgaagatcgggtcacactggcataccaccaaatgcaggaagcgacgttggttcatgatgctgaaagaggcgcctttgatagccacttagcggaactgattatggcggggcgtgaaatctttcggctggagcaaatagaatcgctcgccagagaaaaggtaaaacggctgttttttattgacgaagtcgaagtatttctggggtttcagaatcagttacgagagtcgctgtcgctgacaacaatgacccgggatatgcgattttataacgtttcgggtatcactgagtctgacctggacgaggcggaaataaggataaaaatggctgaaaatagggattttcacaaatggtttgcgctgtgggggccgtggcataaagtgctggagcgcatagcgccagaagagtggcgtgaaatgatggctaaaagggatgagtgtattgaaacggatgagtatcagagccgggtcaatgctgaactggaagatttaagaatagcagacgactctgacgcagagcgtactactgaggtacagatggatgcagagcgtgctattgggataaaaataatggaagagatcaatcagaccctctttactgagatcatggagaatatattgctgaaaaaagaggtgagctcgctcatgagcgcctactggcgatagctgaacgcagtttatcagaagagggagagagcctgtttacccttcggtgtaaacaggcttctgataagcgcagcgtcgtcggtaaacgggcttaacccaacgcctgtagcgctttttccagcgcattatgtaataactgacgatcgtggcgataggggatatcgctggcctccagcacttcctgaatcaccagccgatcgttcaccgcactgacgtcaactcgcggcccaaccactactgcgtcaatgacttttttgccaatatattgctccatcatcgccagcttatcgaccagcgttaaactggcggcgggcagactcagttcgcgacccagattgccgatatacaccattggcgctggggtgcgccgcagcgcctgcgccagttcatccagcagcaggcaaggcatcaggctggtataaaaactgccagggccaatcagaatcagatccgcgtcattaatggcctgtaccgcttcccgcgtcgccggaacgtttggcgttaacatgatctcctgcggcggcgtcgctaactgatcgatattcacctcgccataaatctcatgcccctgatcgtcaatcgccatcagatctaccggtagctcctacatcgggatcagctgcgcgtccactttaagcagattacgaattaaattaatcgcttccagaggccgcacgctcaggtgatctaacgcctttaacatcaaatttccgaggttatgaccagaaagttcgccattaccgccaaaacgatactcaaacatagcggacgcgacgctaggttcggtaattaactgattcagacagttgcgcatatcgccccaggcgatcccgccttccgagcggcgaatacggccagttgaccccccgttatctgtggtagtcacaatgccggtcaggcgcgaacctaatgaagaaagcgaggagaggacgcgtcctaatccatgccctccgccgagggcaacgacacgatcaaggtcagccagcgtacgattgcgcataaaaattcctgaagtcaaataagcagcgctacagtagcgcaagtcgcgggttttcagcaattagccgaccggctaaaagacaattaattattcccgactacccctttatagcgagggcgttaccacggctaaatgatatatatcaatgtaaaagtgtgattttcacgtattctgtcgctaaatagcacgatcatatcgctatgtatatgtttatatagcgaaagcgtgatggcgaaattgtcatttacacgctagtatcggcgtaaccacagtaaacactctagcctctgcacctgggtcatttttgatacggtgctttggccgtgacaacgtttaacgtttgccaccagggcgcaggaagaaatgactccgcctcccgtatttggaaaggtgtacatggcttcacaacttaccgatgctttcgcgcgtaagttttactacttgcgtttgtcgattaccgatgtgtgtaactttcgttgcacctactgtctgccggatggctacaaacctggcggcgtcactaacaacggtttccttaccgtcgatgaaattcgtcgcgttacgcgcgcttttgccagtcttggcacggagaaggtgcgtcttaccggcggcgagccttcattacgccgcgattttaccgacatcattgccgccgtgggtgaaaatgatgctattcgccagatcgcggtgaccactaacggttatcgactggcgcgcgatgccgcgaactggcgcgaagcggggctgacgggcgtcaatgttagcgtggatagtctggatgcgcgtcagttccatgcgattaccggtcaggacaaattccgccaggtgatggcgggcatcgatgccgcctttgacgccggtttcgaaaaggtgaaagtcaacaccgtgctgatgcgcgacgtgaatcaccatcagttggataccttccttgcctggattcagcctcgccccattcagctacgcttcattgaacttatggagacgggcgaggggagcgatctcttccgcaaacatcatatttcgggtcaggtattacgcgacgagctgattaagcgcggttggatccaccagctccgccagcgcagcgatggcccggcgcaggttttttgtcatcccgattacgccggtgagatcggcctcattatgccgtatgaaaaagatttctgcgccacctgtaaccgcctgcgtgtttcgtccgtcggtaagctgcatttatgtctgtttggcgacggcggcgtgagtttacgcgacctgttacaggatgacgcgcagcaatacgcgcttgaggaacgtatttccgacgcgttgcgggagaaaaagcagacccactttcttcaccagagcaatactggtattacgcaaaatttatcttacattggcggttaatccttaataaggagatttcagatgagtcaggtcagcgctgaatttatcccgacccgcatcgctattcttactgtttccagccgacgcggcgaagaagacgacacctccggtcattatctgcgtgattcggcgcaggaggccgggcatgaagtggtggcgaaagccatcgttaaagagaaccgttacgcgattcgcgcccaggtttccgcctggatcgccagtgatgaggtgcaggtcgtattgataactggtgggaccggtttgaccgaaggcgatcaggcgccggaagcgctgttgccgctgttcgatcgtgaagtggaaggatttggcgaagtgtttcgcatgctctcgtttgaagagatcggcaccgcaactctgcagtcgcgcgcggtagctggcgtggcgaataacaccttgattttcgccatgccgggctccacaaaagcgtgcagaaccgcatgggagaatatcattgcgccgcagctggatgcccgtacacgcccatgtaattttcaccctcatttaaagaaataacgatgtcgcaattaacccatataaacgccgcaggcgaagcgcacatggtggacgtttccgcgaaagcggaaaccgttcgtgaagcgcgtgcggaagcattcgttaccatgcgtagtgaaacgctggcgatgattgttgatggcaaacaccacaagggcgatgttttcgccaccgcccgaattgccggtattcaggccgccaaacgcacctgggagctgatcccgctgtgccacccgctactgctaagtaaagtggagattcagcttcaggccgagccggagcataaccgcgtgcgtattgagtctctgtgccgtctgaccggtaaaaccggcgtcgaaatggaagcgttaaccgcggcgtccgtcgcggcgttaaccatctacgacatgtgcaaagcggtacaaaaagatatggtaattggtccggtgcgcctgctggcgaaaagcggcggcaaatcgggggattttaaggtggatgcgcatgattaaagtgcttttcttcgcccaggttcgcgagcttacaggaactgacgcgctggatcttccagcagatttttccaccgttgagtcgctgcgacagcatctggcgacaaagagcgatcgttgggcgctggcgctggaagatggcaagctgttggcggcggtcaaccagacgctggtaagttttgaccatccgctgacggcgggcgatgaagtggcgtttttcccgccagtcacggggggctaacatgcacgaaacgcgaattgtagtcggccctgcgccgtttagcgtcggggaggaatattcctggctggcggcgcgcgacgaagacggcgcggtcgtcacctttaccggaaaagtgcgcaatcataacctgggcgatagcgttaaggcgctgacgctggagcattatcccggcatgactgagaaagctctggcggagatcgtcgcaaaggcgcgttcccgctggccgctggggcgggtcacggtgattcatcgcgttggcgaattatggccgggcgatgagattgtgtttgtcggcgtcaccagcgcgcaccgcagtagcgcgttcgacgccggtcagttcattatggattatctgaaaacccgtgcgccgttctggaagcgtgaagccacgccggaaggcgatcgctgggtcgaagcgcgcgacagcgaccagcagttggcgaaacgttggtagcagaatgtgatacgctttagggtatcatttccacacaggagttcatcatggacagatttccacgatctgattcaatagtgcaggcgcggtccggcctgcagacctatatggcgcaagtgtatggctggatgacggtcggactgttactgaccgcgtttatcgcgtggtatgcggctaatacgccagccgtcatgatgtttgtcttttccagtaagatcactttctttggcttaattattgcccagcttgcgctggtgtttgttctgtcgggactggtgcataaacttagcgccggaatggcgacgacgctgtttatgctctattcggcgctaaccggattgacgttatccagtatttttatcgtttacacctactcctctatcgccagcacgtttgtggtgacggggggaatgtttggcgccatgagcctgtacgggtacaccactaaacgcgatcttagcggtttcggcaatatgctgtttatggcgcttattggtatcgttctggcgtcgctggtcaatttctggctgaagagtgaagcgctgatgtgggcggtaacctatatcggggtggtggtgtttgtcggtctgaccgcctatgacacgcagaaactgaaaaatatcggcgagcaaatagatacccgagatagcgctaatctgcgtaaatattcgattctcggcgcgttaacgctgtacctggactttatcaacctgttcctgatgttactgcgtatttttggtaatcgccgctaattatagcgatctcttaaaatcctggccctgcgccaggattttttttaggactatatttagggcgaaacagcataaatatcttagaaatgttttcctacgcttgccattcttatcaccgtgatcatgtgaagagtgataaatgacaagtgggacctctggctgcaatacgtatacgacaaatagcatttattccctcgacaatgttatcccttacctattggtatactgcgttgggactatggtgtaccgccggcattatatggttaacgttgtatagtcattttttaataacccacgttcaacctgttgttgttttgtggatatcagcacttttgcttggcctggggtatggggccattacctgtctttcccgctttggcactgttgtcgcaacgttgatatatattgccatcattacgcttaccggcgtgtcattagcttaccttttctcaggtggcgcgaccattttcgtgattgttggaatcatgtttagtcttaatgccttatttattttctacctgaatatcagttctggtctattcaggccgttaatttttatggcggtaagcgggatcatcgctgcgatagttgtcaatagcctggtggccagtagcactctggtctggatagtcagtgtgctgacggtattggtatggacattgattacagcactagaaaaatcgacacttcatggttatgcccgcatgttataccacagcgagttttcatcgctgcctcgttgcgctttatttggcgcgctgacgctttaccttggcattattaatgctgtggttacgctgtgtcgttatatcattttgatgattctggaaatactattatctttcaggccgtaggcgttgcaggttttttattcaggttggtgatgatgggtataatgagtaaattatgtggcaaacaattttggttagcgttttgtgaagctaaagacgtcactcgcgccattaaaaatggcggcgaggattttaataagaaatgcccaccagcgctgatttctcatttcattaccggattgtcatgggaacattcattacccaatcctgcgcctgtttgcgcgtttagttttatgcttcttgtgggaggtgtgtgcagtgcgcattttgtttttgataagtttatcctgtattggccactaaatataattatttattttggcagtgctataggtattatgctatgtgttatggccgaggtatggcttattgccaaaggctttattctggggttgcgcctctgcgttttactgtttttgttaaatattatgctctgcggtactggattatttgacgtgttgtgccatcaaaatagcgaactaaagagtgatcttgttatcgcgattattatggttgtgctttgccgctgggtgatgaatggcgaaacgtttacgatgatgattcgtttctgcctggggcgtcgattagtgcgagttgcattacaaaaatatctcacctcacagacaaggaaatgataagcccatgaacctgatgacgtggctaacaggaaaaacactggcggagctggtgaaaaaagggcagttgatcccgccagaaattaagttacctgtgtatccggccagccactacaaaaaaaactggtatgaacaaggtattcctcacggaggcgttattgggcttacggcgatcatgatgaccatgacatggatcgtcagtataaacatggttattgcgcagtttgagctgcacaataaaaagcatctggagctggtcttcttcctggccgtgggctatatcgcttttcttaccccgtcaaatcagctcctgcttaaaggaagaatgagcggggttattatttaccgctatgcgctattactggtcattatttccgttacgttggcaacgttctgtaccctgtcatcagtattcatgggcgagtttcacgaagtgctcctgctgctgtttagctggtcattgctgcttttttcccgcttacagatgaatacgtcttttttctcagcatatgtttatttttaccggataaaacgcgttgtgctggaaagcgaaaacgcgtctgcttaaatttatttcgccatcgcccgctcgtttttcgcccgcagcttcttcgcccggctctccaggatcagatagcacaccagcgccagcaacaggggaataaaatagtaaagcacgcggtatgcgagcagggcggcgataatcgtgccttgcgacgtatgttcgcccgccagcaacgcaaggaatacggcctccagcacgccgatgcctgccggaatatgcacgatgacgcccgcgatactgctcaccagcagtacgcccagcacaaagaaatagttcacatcctgacccatcagcagccagatgatggcgcccatcgccatccagttcgcgctggagatcgccatctgcgccagcgcgaatttccatgacggcagcaccagtttctgtcctttaatcgtcatatgccgccgcttcgcaaaggcgcaaaaccacagatagaccgcgataatcaacaataaaacgataccgagaattcgtagcgtgcctgcatcgatataccagtggtcgggaagctggacaatgccgaaggtaaaaatgatgccgccaagcagaatatagcccagccagttagtggtaatgctgagtgagaaaatgcgcgtgatagtactgccgggcaacccgaggcgagagtatagtcggtaacgcatcccgatcccgccgacccaggtgctgagcgtcaggttaaaggcatagcagacgaacgataccaacatcacctgtcgcttcgccagtttatggccgcaataaagccgtccaagcaggtcgtagcagccgtacagaagatagctaacgatcaccagtcccacagcgcttaaaagcgccgtgcggttatagtcacggatgacggtccagacatcgccccagtcgacctttttagcataaaccaccagcagaacgacgaccgcaataaaaaacagccaggtcagcacttttttagccagccgccagcgcggatgcgatttagccattagggcttcactcctgtattttctggatcaacgcgatcctgggtttccatttctggctgggcaggcgggggaacctgctccagatgcggggtatgcgccggtagccagccgaccagcgccgggaaatgacgtaaaaagtggaacgccagcacgcttttggtcaggttccaccaggtgcgtttcggcagcatagactcatcgacctgcttacaatcgttcacgatgatgccttgtaagttatcgcgcagggtctggttaaaagtacgatcgtgaatgatcaggttagcttcaaggttaagcgacaggctgagcggatcgagattactcgaccctaccgtggcccagtgatcgtccatcagcgccactttgccatgcagcggacgtcgtcggtattcataaacctgcacaccgcccttcaccagatagttatagagcaaccgcgcgccgactttgactatcggcatgtctggttccccctggacaatcagttttacgctcacgccacggcgggcggctttacgcattgcgtggagcaagcgatagccggggaaaaaataggcgttagcgataatcacttcacgctttgcctgggtcagcattttcagataatgacgttcgatatcgtcgcggtgttcttcattatcccgccagacaaacagcgcctgcgcttcgccggggtggcgattttcttcagcctgatgatggcgcttccaccagcggcgcgcggggctttgccccggcagattctcgacttcgaattgcaggatatcggccactacaggcccttcgacccgtaccgcgtagtcttgtttcgcctgcgggccgtaatccgacatatgttcggcggagtagttaatgccgccgacaaaggcaatacgatcatcaatcaccacaattttgcggtgcattcggcggaagatattggttcgcaaccccagtagacgcgggcgggggtcgtaatagcgaaaaatcacgcccgctgaggtcaattcgccgacaaacgcgtcgctgagatcgggagagccgtagccgtcgagtaatacttcggcttttacgccgcgctgtgcggcttttagcagagcggtatggagttttttacccacctcatcttcaaacaagataaaggtttccagaatgattttttgctgtgcctgagcgatagcctcaaacacggcaggatagaactggtcgccgttttccagtagctgaatttgattaccttcacgccagccgcatttcatagatggatctccgcgctaaggggggcatggtctgataaatgtcgccagttccgcagcggcagcgccgtaggagaactggcgttcgcattcttgacgtaaatacgatcgagtcgcagcagcggcatactcaccgggaatgtgcgcgccggtcggccatgggcacgggtgaatatctcctccagcccggccgcgtttaacggcgggccggccttttgccgccagtcattaaagtctccggccaccagcaccggttctgattccggcaaggcattcacccatcccgccagcatggttagctgtgcctggcggtgactctcccgcaggccgagatgtacgcacatgacgtggatagggcggttgagcatgggcggcgtaatgcggcaatagagcacgccgcgtttttcgctaccgccgaccgagacgtcgcgattttcataatgttcaatgggatagcgagaaagaaccgcgttaccgtgatggccttccggatagaccgcattgcggccataggcgaaatcgctccacatggtgtcggccaaaaattcatagtgggtagtgtccggccagttttcgatatgcagcggatgtacttcatgcgcgcccatcacttcttgcagacagacgatatcggcgccgaccgttctgacagcgtcgcgcagctccggcaggatgaagcgtttattaaaggcggtaaaacctttgtgcgtattaattgtgagcactttgaatgaaaaatttcgcgtgtgttgagtcattttcttcctgtccgcgtcactatcctgattgaaatagtgtagtcgtcgtcacaaaaagatgcggtcttacggaattttccgtaaagttcggtactctgaataatgagagaaaaatgcttcaggagaaaagccatgaagtggcaacaacgcgttcgtgtcgcaaccggcctcggttgttggcagattatgttgcatttactggtagtggcaatgctggtaataggctggatgagcggcacattagtgcgcgtcggcctgggattatgcgtgctttatggcgtgacggtactgctgatgctggcgttgcagcgccatcatgagcaacgctggcgcgatgtggcggatgtgctggaagagctgactaccacctggtacttcggcaccgcgctgattgtcctctggctgctatcccgcgtcttgcaaaacaatgttttactggcgctggcggggctggctatcctggccgggcccgccgtggtctcgctactggcgaaagataaaaagctacatcactttgcgtctaaacatcgcatacgccgctgaacccgtggtggccgctatcaccagtagcggccacaaacttccccagacaatccccagactcgcgtccttaagataaatttgcttagtaatatcagtaaagtggcggataggatttatccacgtcaggttttgcagccagaccggcatattttccaccggcgagacataacccgagagcaaaatcgccggcatcataaagacaaagacgccgataaacgcctgctgttgcgtggcgcaaagcgatgatatcagcaagccaaagcctaccagcgacagcccgtaaatcaccatcgtgaaataaaacagcgctaacgaaccggcgaagggaatttggtatgcccaaatgccgatagccagcacgatcgtggcctggaaggtcgcgacaatcagcgccggcaccgctttaccaacgaaaatctgccaggtggtgagcggagagaccagcagctgatccagagtgccttgttcacgttcgcgggcgacggacagcgaagtgacgatcatcacgccgatagtggtgatcatggcgatcagcgagggcaccacaaaccacttgtagtccagattcgggttataccagttgcgtaccaccagttcgctattgttgggctttggcttgccgtccatcaatgtctgctgatactccttgacgatctgttgcagataattggcggcgatttgcgcgctgttggagttacgtccatcaagaatgagttgcatcggcgcaggctggaaggtatccagattccgcgagaaatccgccgggaagcgtaccagcagcagcgctttttgcgtatcgatagtcggctggatctcctgcggactgttcagcaatagcacatgggtaaacgctttcgcgcgggcaaagcgctgggtaagttctaccgaatgtttgccgttatcttcgttatagatggcgatagtcgcgttagtgacttcaagcgtcgcggcgaacggaaacaggatgacctgaatcagcaccggcagaatcaggatcgcgcgcgtttgcggttcgcgtaaaagcgattgcagttctttgcgaattaacgtccataagcgatgaaacatgtccgtcctctcagtccagtttgtaggcctgataagcaaagcgcatcaggcataatgccggatggcggcgtgaacgccttatccggcctacgacgacaattatccatacacatatttaatccagccgtcgtttggtttttagccacgtcaggccaataaacatcaccgccgaggcgattaaaaacagtacgttaacgcctaacacgaccggaatattgccggccagaaacagactttgcagggtgctgacaaaatagcgcgccggaataatataggtcaccgcgcggatcaccgcaggcatactgtctatctggaagataaatccggacagcataatcgagggcaaaaacgcggcgttcagcgccacctgcgcggcgttaaactggttgcgagtgatggtggaaatcaacagccccatccccagcgtactcagtaaaaacagactggtgatgataaacagaatcaccagcgaaccgcgatacggcacgccgagaataaacaccgataccagcatacagagcagcatcgccagcataccgagaaagtaatagggaataagcttacacagcagcagttcaacacgcgtcacttcggttgagagcagcgcctccatcgtgccgcgctcccattcgcgggcaacgaccagcgaggtgaggattgcgccaattaccgtcatgataatggtcaccgccccgggaataataaaatgctgactgatcgccgccgggttaaaccagtagcgcgtctggacgtcgatgagcggttcaaaggtgtcgccgcgatcttccgcgcgctgctgttgccagatttgccagatgccttccacataaccctgaacgaagttggcggtgtttggctcgctgccgtcggtaatcacctgaatcggcgcgctgtcaccgtcgcgcgccatttgctgcgcgaaatccaccggaatcaccaccagtccgcgaatgcgtccggcctgcattttttcaattaattcatggcggttatcgctaatggtcgcgtcgatatagggtgaaccggtcatcgcatgagtgaaatccagcgcctcctggctttgttgttcaagcagaatccccacccgcagtttgctggagtcgaggttaatgccgtaaccaaaaataaacagcaacagcagcgggatcaccaccgcaatcagccagctactgggatcgcgcacgatctggcgcgtctctttgacgcacaacgcacgcacgcggcgccaggagagagacttactcatgcgtatgctccttatcccagtcattgatgagagtgataaaggcctgctccatcgttggatcggcctgttgctcatcggcggcctgcgctttgagatcgtccggcgtaccgctggcgataagcttcccgcgataaaccagtccgatgcgatcgcaatattccgcctcatccataaagtgggtcgtcaccattaccgtgacccctttttccaccatgctattaatatgcagccaaaattcacggcgggtgaggggatcaaccccggacgttggttcatcaaggaataaaatatccggttcgtgcatcagcgagcaggccagcgccagtcgctgtttaaagcccagcggcagcgcatcggtgggatgcgacgcgatgcttttcagaccaaacgcttcactcatgcgctgaattttttcattttgcgcgcggccccgcaaaccgtagacgccggagaaaaaacgcaggttctgctcaaccgtcaggttgccgtaaagcgaaaatttttgcgccatatagcccagatgctgacgggctttgccggagctgactttcaggtccatatccagcaccagcgccttgccggacgtcggcaccagcaggccgcacatcattttaaaggtggttgatttacccgcgccgttcgggccgagcaggccaaaaatctcgccgcgctgtacgacgaaattaacatggtccgtagccgcgaaatcgccaaattttttcgtcagttcctgcgcttcaatcaccgtttcgccggcagtgccttcaaccgtatgcaggattgaacccagcggagactccgaggttcccgctccgccaagcagatcgataaacgcatcttcgaagcgcggcgcggtctcattgagggtgatttccggcatcccttcggcctggcgaatatctgctgcggtcgcctcttttttcaggatcaggcgtaccgaacgtccctgaatcatgccgtcgctcacctgcggcagtctgagcgctctctgtagcaacttacggttgttttcctgtggactactcatcagaaagctacgaccggccatcgtttgcgtcagcgctttaggttcgccctgatagagcagctcgccttcattcatcagcagcacatcgcgacactgttcggcttcatccagataggaggtgctccataaaatcagcatcccgtcgcccgccagttcgtgaaccatttgccacaactcgcgccgtgaaatcgggtcaacgccaacgcccggttcatccaacagcagcactttcggttcgccgaccagcgtacaggccagccccagtttttgcttcatcccgccggacaatttccccgccagacggccagtgaaagggccgagggcggtaaattccaacaaacgggcaaaggtcttttcccgtatctcgccggtaacgctgcgtaaatcggcatagagattaaggttctccatgacggtaagatcttcatacagaccaaatttctgcggcatatagcccagaaccgcgtgcagctcgctgtcgttttgtatcgggtcgaagcccaatacggacgcgctgccgccatcggctttgagcaggcctgccagcatacgcattagcgtggtttttcctgcgccgtccggccctaccagcccggtgacataaccggaatgaatggtacagtcgagcggcgcgacggcgggtttatccattcccgcaaagcgcttcgtcagaccgtgcagcgtaataacggcctcactcatgccgtgcctcgtcattaaatttcaccgtgactggcatcccctggcgtaacgcatcgtccgcatcggtgacgataatgcgcaggcgatagacgagatcggtacgcagatccggcgtttcgacggttttcggcgtaaattccgcggtgggcgaaacgaaaccaatcttgccgtggtaaggtttgtcaggacgaccgtcggtatacaacagaatgtcgcgccccggttgcgtctgactgaggttgcgttcatcgacataggcgcgcacccagacggggcgggtcagcgagagcgttaataccgtgctgccggcgttcagcatactgccaggctcgaccgcgcgggtgagcaaggttccgttggcaggcgcgataagcgtggtgtcctgcaaatcaagctgcgcctgcgccagttgggcctttgcctgttccaggctggctttcgcctgggcgatatcctgttcacgattaccggtacggtactggctcagtttatcctgcgcggacttcagcgtcgcctgcgcctgatcgcgcgatgagcgggcgttttccagatcgttagcggaaatggtgcggcttttccacaatccttgctgacggttataaaagttttgtgcgtagtcataggcggcttgcgcctgtctgacggcggcggcggcctgggctatctcttcatcgcgatagcctgccagcatcaaatcatattgcgcctgcgcgaccgacacgccagctttcgcctgcatcagcgcgttttcgtatggcgcgtgatccagttcgccgagcacctgtccggctttgatagtatcgccttcatcaacattcagcgacgccagcctgccgccgacgcgaaagctgatattgacggtacggatatcgacattaccgtatagcgtcagcccatcgtcctgccgactttgataccaccaggttccaccggcaatcacagcgacgatcgctgcgattgccagtccgataacgacaggttttttcatcagtccagactcctttgcgttaaaccgtgcagaataagatcgatgtggcaggttaccgtctggtaaatcagctccgctttttcttcatcaaactgcggccagccggtacgtaacagaatagtttctttgccgagacgaaacgccagcacttcgcccactaaggcatgggtatgcaaaatcatgcgcgtatcattggcgtcgcagccggtataagcggcaaccaatcttgtcagatgggtgtgcaacggatcgataacctgttcatggaccaattgataggccgacgtgggagagagctgctcgcgtgaaataaatttgctcaggttaacggtgtcttcctgcgtcagcagcataatcatgttcttgcaggcgagcagaatgagttcgcgtatggcgtcccggtcaggggcaggctggctaaacagacgctccgctttttcagcatgcgggcgaaatttttcgccaagaaaatcggcaatccactgggcgcaggcgaggtataaatcctcttttgagccgaaatagtaagtaatggcggcaatattttgccccgccagcgcggcgatatcgcgcgtggtggcatggaggccatactcgccaaactgcgccagcgcggcggcaatgagctgacttttcgcctgctcgcccttggtggtcgtggtgggaatattcatcacacgccctaatttttaatcaatcgattgattaagactatgactcataatggcacttgtccagtgtggtcgattaatttgtctttgctaccttccgggataatttatgcgccgcatcacaaaaactgctacactccgccccttcatgacattgtggtttttgtcattccaaatttgagcatctccctgaaaactacaccggcaacggtcggggcggtccggagtagttatgtcttttgattccctgggattaaaccctgatatcctgcgcgccattgccgagcagggttaccgtgaacctacccctattcagcaacaggcgattcccgccgtgctggaaggccgcgatctgatggccagcgcccagaccggaaccggtaaaacggcgggttttaccctgccattgttgcagcatctgattacccatcagccgcatgctaaaggtcgtcgcccggtgcgtgcgttgatcctcacgccaacccgcgagctggcggcgcaaattggcgaaaacgtcagagattacagtaaatatctcaatattcgctcgctggtggtatttggcggcgtaagcatcaatccgcagatgatgaaactgcgcggcggcgtggatgtgctggtggcgacgccgggacgtctgctcgacctggaacatcaaaatgccgtgaagctggatcagattgagattctggtactggatgaagccgaccgtatgctggatatgggcttcattcacgacattcgtcgcgtgctggcgaaactgccggcgaagcgtcagaatctgctgttctccgccacgttctctgacgacatcaaagcgctcgccgaaaagctgttgcgcaacccgctggaaatcgaagtggcgcgccgcaacacggcctcagagcaggtaacgcagcacgtgcactttgtcgataaaaaacgcaaacgtgaactgttgtcgcagatgattggccagggcaactggcagcaggtgttggtcttcacccgcaccaagcatggcgcgaaccatctggcggaacagcttaataaagacggtattcgcagcgcggcgatccacggtaataaatcgcagggcgcacgtacccgcgcgctggccgattttaaatccggcgatattcgcgtgctggtggcgacggatattgcggcgcgtggtctggatattgaagagctgccgcacgtggtcaactatgaactgccgaacgtgccggaagattatgtacaccgtattggccgtaccggtcgcgcggcggcaactggcgaggcgctgtcgctggtctgtgttgacgagcataaactgttgcgtgatatcgaaaaattgctgaaaaaagagatcccacgcattacgacgccgggctatgagccggacccgtcgattaaagcggagccgattcagaacggtcgtcagcagcgcggcggcggcggcggtcgtggacgcggacaaaatcaggggggagcggggcgcagtcagcagccgcgacgtcaggatagtggggcggcgaaggcgaaaccaaaaccgcgcacaggcgaggggaaaaccgctggcgacaaagcacgtccgccgcgtcgcccgcgcagaatcacgcctgcccagtaaattttatccggcaacatgcccggtagcgcgacgcttaccgggcctacggactatgcaaatacgtaggccggataaggtgcttgcaccgccatccggcaaaatacacatcgcgttgcgagccgccttccagaaccggtaaaaaaggtacttcccgcccctgaaatgtgacacaatagtggctgtttatacagtacttcaggttttctcatggcattgaccgctgcgctgaaagcgcaaatcgccgcctggtataaggcgcttcaggaccagattcccgactttattccccgtgcgccgcagcggcagatgattgctgacgtcgccagaacgctggccggggaagaagggagacatctggctattgaagcgccgaccggcgtcgggaaaaccctctcctatcttattcccggtatcgccattgcccgggaagagcaaaaaacactggtggtcagtaccgctaacgtggcgttacaggatcagatctttagcaaggatttgccgctgctacgaaaaatcatccccgatctgcgctttaccgccgcctttggccgcgggcgttacgtgtgtccgcgaaacctggcggcgctcgccagtagcgagcctacgcagcaggatctgctcgcctttcttgatgatgaactgacgcctaacaaccaggaagagcaaaagcgctgcgccaggctgaaaggggatcttgacggttacaaatgggatggtctgcgggatcataccgacattgctattgacgacgatctgtggcggcgattaagtaccgataaagccagttgtctgaaccgcaactgtcactattaccgcgagtgtccattctttgtcgcccgacgtgaaatacaggaagcggaagtcgtggtggcgaatcacgcgctggtaatggcggcgatggaaagtgaagccgtactgccggaaccaaagcatctgctgttggtactggatgaaggtcatcatctgcccgatgtcgcgcgcgatgcgctggagatgagcgcggaaattaccgcctcctggtatcgcttgcaactggacctgttcagcaaactggtggcgacctgcatggagcaatttcgccctaaaaccacgccgccgttagcgaaccctgagcgacttaacgcccattgcgaggaggtatacgaactgatcgcctcgctcaatgccattcttaatctgtatatgcccgcagcgcaggaggcggagcaccgttttgcaatgggcgagttgcctgatgaggtcatggaaatctgccagcgactggcgaagctgaccgagacgctgcgtgggctggcggaatcctttctcaacgatctcagcgaaaaaaccgggtcgcacgatattgtgcgtttgcatcgggtgattttacagatgaaccgggcgctgggaatgttcgaggcgcaaagtaaattatggcggctggcttcgatggcgcagtcttcaggcgcgccggtgtccaaatgggcgacgcgtgaaatacgcgaagggcaactccacgtctggttccattgtgtcggtatccgcgtcagcgatcagctggaaagattgttatggcgcagcgtaccgcacattattgtcacctcggcgacactgcgctcgctcaatagcttttcgcgcctgcaggaaatgagcggcttaaaagaaaaagccggcgaccgctttgtggcgctggattcgccgtttaatcatgtggaacaggggaaactggtgattcctcaaatgcgctacgaacccaccattgataacgaagagcagcatattgccgaaatggcggcctattttcgtgagcaactggagagcaaaaaacatcatggtatgctggtactgttcgccagcgggcgggcgatgcagcgttttctggagcatgtcgctgatgtgcgcttactcctcctggtccagggcgaccagccgcgttaccggctggtagagctgcaccgtaaacgggtggagagcggcgaacgcagcgtgctggttgggcttcagtcttttgccgaagggctggatcttaaaggcgagctgctgacgcaggtccatatccataaaattgccttcccgccgatcgacagcccggtcgtgatcaccgaaggcgaatggctaaaaagtctgaatcgttatccgtttgaggtacaaagtttaccaagcgcgtcttttaatttaattcagcaggtagggcgattgatccgtagccacgcctgtcggggagaagtggtcatttatgataagcgtttgttgaccaaaaactacggacagcgtttactgaatgccttacctgtttttccgatagagcagcctgccgtgccagacgttatagtaaaaccaaaagcaaaacctgcacgccgccgacggcgttaatgctgtgagcacacttcaaggagctttcaatggattatcgcaagatcatcaaagagatcgggcgaggtaaaaatcacgcccgcgatctggatctggataccgcgcgcggtttgtatacccgaatgctgaatggcgacgtccccgacctggaaatgggcagtatattgatggcgctgcgtattaaaggcgaaggcgaagccgaaatgctgggcttttatgaggccatgcagaatcataccatcaaactgacaccgcccgcagataggccgttgccggtcgttattcccagctataacggcgcgcgtaaacaggcgaatttaacgccgttgctggctatcctgctgcataaattgggcttcccagtcgtagtacacggcgtcagtgaagatccgacccgcgtactgacggaaactatatttgagctgatggggattatccccaccctacacggtggacaagcgcaggccaaactggacgggcgccagccggtgtttatcccggtgagcgcgctctgcccgccgctggaaaaacagctggcgatgcgctggcggatgggcgtgcgtaacagcgcgcattcactggccaagctggcgacgccatttgctgaggatgccgcgctgcgtttatcaagcgtttctcatcctgaatatgttccgcgtgtggcgaccttttttagccgcattggcgggcgggctttgctgatgcatggtaccgaaggcgaagtctatgccaacccgcaacgctgtccgcaaatcagcctgattgatagccgcggcgtgcaggtactgcatgagcgccagagcgacacgtacgacgagccgctttcactgcctgcgactaaagatcctgaaatcaccgcgcgctggattgagcgctgccttgccggccacgagccggtgccgcaatcattaaaaacgcaaatggcctgttgtctggttgcgacgggagaggcggcgacgttagaagacgggcttgcgcgcgtcgaacaggcttttagcgaataaaaaaagcccgtccagtgacggacgggcaaataagggtaacaaacagggttaatgagggttggagcagtgggtctgttggcaaacagacgagggtaatacccgtcagaattcaaacaacagcgatgttacagcctgaaatctggcgggcaggtaaattatttataaatcaccgcagtgccgctcattttgtcattacctacggcggaggtgatgttataagcgcttgcgccagcagcggcggctttttcagccagtttagcttccaggccatccagcgtggtggcgccatcggcagacactacgccgattttatgcaggttttgcgtctgagacgcgctaaccggttctgcggcaaaagcgccaaaagaaagggtggaaagcgcgatggctgcaacagcatatttaatggttttcatgattaatctctcgcaggttattctgtttatgggacgatgttccgtcgatgtgatgagtatcacggttttttgcgaaagataaaatcgaatagaattgactgccttgctcaaaatttttgaatgacaaataacctattgattattaattaattcaacggttgaatttacctttcttgtcatctggctttacagagtcgaggttaacggcacattctgcgacgcagaacgctaaaaagcatgagcgtaaaggaatggataatactggcggtttcggtaaagaaaagtcagcgtaactggctgtcttttgaacctctacgattatatcctgaaaatgttgcgttatgtaaatctttctcctgttggcaggctatgcataaccgaacgcccggcacggctttacgccgcgcttcagggataggatcgccgcaagattcgcattcatcgcgactttcgccgtggggaagttcgccgcgagcgcgggcaacggcatcttcaatggtattgttgatttgttcattcactgcgtcgtcatttgcccagccggatgccatcacgctctcctgattttagggtacctgaggttaagtgtagcgccgtcaggcgaaaaaatcgcatcgcgcggccttttcagaccatgagcagagccaatgtcattcagagagccgatcaaacgagcgaggcagggaattcgcggtggtatatttaccccgtggcgttatacgggtatcttacgccgctgctaaaaggagaatgccatgtccgcccagaaaccggggttacacccgcgcaaccgccatcaacaccgttatgatctcgccgcactgtgtcagaccacgccggaattgacgtcctttcttatccgcacgcccgccggtgaacagagcgttgattttgctaatccgcaagcggtaaaagcgctcaataaggcattgctggcgcatttttatgccgtcacacactgggacattccgccagggtttttatgtccgccggtgcctggtcgtgcggattatatccatcatctggcggatctgcttggcgaaacgacagggagtattccggcgcaggcaactattctggacgtgggcgtgggcgccaattgtatttatccgcttatcggcgtccatgaatatggctggcgatttaccggtagtgaagtcagcgacgcagcgatgtccagcgcgcaggctatcattcaggctaatacggggttaagccgcgccattcgtctgcgtcggcaaaaagatccggcggccatttttaccggtatcattcataaaaatgaattttatgacgcaacgctttgtaacccgccttttcacgactccgccgccgcagcccgcgcgggcagcgagcgtaagcgccgcaatttggggcagaataaagatgatgcgctgaactttggcggtcaacagcaggagctatggtgcgaaggcggcgaagtcgcctttattaaaaaaatgattgctgaaagccaatccttccgccgtcaggtgttgtggtttacgacgttggtgtcgcgcggcgagaatttaccgccgctttaccgggcgttgacggaggctggcgcggtgaaagtggtgaaaaaagagatggcccaggggcaaaagcaaagccgctttattgcctggacctttatggatgacgaccagcgtcgccgttttatcacccgtaaacgctaaatcgtcggttcgcgcggcggcagcgaatcaggcgacgggccgccgacgggggcgggcagaacctgatacgtttgcaccggcgcgcgcacattagccagatcaaaatgctttttcacctggctatcaagggcaaaacgcaccgtccactgcttgagcggtagcgtggtgaacgacacgcgtaaagtaaacgccgtgttcgttaaactgacaataccggcgaacgtgggttcgccgataatcagcccgcgaatatcctccgtctccatcagcgccgttaccgcgtctttcagcgcctgattcgctttatccgcatcctcatggcgatccacgtcatagttggcgacaacagagccgataccgcgcacaaagttggcgaaagtggtgatcgaggaccacgggataatatggtatgccccggtatcctgccgcacgccgacggaacgaatcgacattctttcgaccgtccccgtcagcgggcctatggtgactaagtcgccggtattcatcccgttttcaaactgaataaagacgccggtgataatatctttcaccagggtttgcgaaccgaaagagatagccagacctaacgcgcccgcgccagccagcaatggcgcgatattgacgccgatttccgataacacgatcatgatggttatggtactgataatcactgccagcgcattgcggaacagcgtcagcagcgtgcgcgtgcgggcgctgggtagcgggcggccatgaatatcggaggccagacgattctcaatcagactggcgaggatcgtccatcccacggcggagaagaataagattaacgcgatacggataaggatatcgaccatcttttcccccgcgccataatgtagccagtgccagaaatcgaatagcccccaggcgttgagcaacagcataacggcgacgcagacggtcaaaaagcgtgcgacttttagcgccgaggagagccagccgttaagccgcttttgtaattccgggtaattgcgctgcgtatggggcgacagggtgatggttttcgctatccagcgggtaaacataccggagataaacgccgcgatgccaataatcgccagactgcgcacggtcgcgcccatcataaacttcaggctattgcctgggtcgaataacgagaagaaaaacagcacgataaagtaagcgctggccagccagtgccacaccagcgcaaaggcgcggataaacaggctaaaaaaggctaatgatcgttccgccagacttaataaatgttgcgtaatctccgctttgtttttaaagatcaggtacagcgcccagatggtgatgcagagcatgatcgccacattagccatcgcgccaacctgaacattcacctggttggaaataatcggaacggcaacaattagcccgtagccaatcaaactgctaagggaactcatacggcgattccagtaacgcgctgtcgcatcctgaatcgcgaatgggcgtaattccggtacattagggcaaaaaataagccgcagaatcgctttaaagaactctattagcgcgaaggcattcaggaacaggctttgctgaaaagcgatagttcgacttcccgcatggaaattatcactgagcatctgaccgataaataaggtgagcgccagtagcaggaggtcgataataaacgcgccgacgatcatcgccgggagctgtaaccagttgctgcgttcacggtttttcttgcgtgcccacaggcccatttttcgatataacggcagggcgcaaagccgtatcacgctataaaaaccaaataccgcgacggccagaaataaaaagtgggttaacgcgttggtgaaggtttgcgagttaaacggcttgtgcggcgcatcggtgatgttgcgataaagctgggcgaaacgggtagcgaaagcatcgccgtactgacgggtaacggtggtgacgttctccagtaccgttttctcatctttggccgcaggcggcgcaagcgctggcgctggctcggtcggcggcgtggttgaggcttcgcggagttgcgctatcaattcgttacgtgaagcctcgttctccagtacgtcagccagggccgcataggccgcttttttttgttcaggactgggctctggcgctgcttgctggctggttgatgtccccgtggtcacgccgggtatggcgaccgcatgggcaggtgcgcccagtagacaaaaaaggatgaacagggtccaccgcatgactcctccagtgagaaaagagacgcaaaacactaagtatagatggcgcaggggagggaaaatgaaatgggactattccatgatgcccttcctgccgcagggctggaagggcgatatctcaggagacgtgctgtaaaaattcctgtaaacgtgggcttggcgggttttcgatcaacgcctgcggactgccatcttcggcaatacggcctttatcgataaaaatcagccgtgaggcgactttttcggcaaagccgatttcgtgagtgacaatgaccatggtcatgccttcttccgccagatcctgcatgactttcagcacttcatggcgcagttcagggtccagagcggaggttggctcgtcaaagagcatcattttcggcttcacggccagcgctcgggcaatggcgacgcgctgttgttgaccgccggaaagctcggaggggtagtggtgcgcccgttccgccagtccaactttcgctaacagagctttcgcctgtttttccgcttcttctttctttacgccgcgcacgcgcagaggaccgaacatcacgttttcgagcgcggtcagatgcgggaacagataaaactgttgaaacaccatgccggcttcctggcgaatcagccgttcgtctactttaggatcgttgactttcagaccatcgacaatcagatcgccggaggtgatctcttccagtttattgatacagcgtaataacgtggatttacccgaaccggaagggccgataatcacaaccacttcgccctgacggatgtttaaatcaatgttatgtagcacctgggtggggccaaagtgcttggagacgtttttaaattcaatcacaggattttcatccttctttcaagacgacgcaaaataaagctcagcaccagcgtaatgatcaaatagaagacggccacggcgctccagatttccagggcgcgaaagttaccggcaataatttcctggccctgacgggtcagctcggctacgccgataacaataaacaacgaggtgtctttgatgctaatgatccactgattgcccagcggcggcagcatacggcgcagagcaagcggtaaaataacatggcggatggtttcccggcgagaaaggcccagcgccagacccgcttcgcgaaaacctttgtgaatggatagtactgcgccgcgagtaatttccgcgatataagcgccggagttaatcataattgtcacgaccgctgcgctgaacggatcaatacgcaaatcattaaatgccatcggcagggcaaagtagataaacatgacctggacaacgatgggcgtgccgcgaataatttcaatgaaaaccagggcgatgtggttggcgaaccagccgccaaacgtacgggcaaaacctgccgccagtccaataaccaggccgccagccagaccgaggaccgagatccacagggtcattttagcgccctcaagcaaaagcggaatggcgggccagatggcgctccagtcaaactgcatatgtcgttcctgttaccgtggtgtaaatagtcaaatgctctatccggcgcggaaatggcggaaagtgtcttatccgtcacggaaagagctgtaggcccggtgagcgtcctcactaccgggccacaagccaacatcaggtcgttttatttaggttctgtaccgaaccattttttgtagatttcgttataggtgccattctcacgcagcgttttcagcgcgccgttgactttctcgcgcagttcatcgctgcctttcgggaaggcaactccgtattgctgtgcttccagcgattcgcctaccgccttgaactggccgttgcctgcggttttgataaagtacaggatgttcggcgtatcgtgcagaacggcgtctgcgcggttggtgcctaattccatgtacgcgttatcaatgttcgggaactgacgcaggtctttggttttgatattcgctttcgcgtaatccaccgacccggttccgctcttcacggcaacgactttgccatcgaggtctttaacgcttttaatatcgttattgttggctttcaccatcacgagcagaccgcttttgtaatagccatcggaaaagtcgatcgcttttttacgctcgtccgtaatcgtaatacccgccagcgccagatcgatatttttggtttgtaatgccggaataatgccgctgaaatccatcggtttcagggtgtagtccagcttcagttctttcgcgatagcgtcccacagatcaacatcaaaaccgacgtatttgtcgccctgtttaaattcaaacggaacgaacgccgtatcggttgccacaacgagtttcttatccgcagcgtgcgaagacaccgcaaaagccagggtaagtgcagccagtgaaacttttaatagagacttcatagcatttccttttctatccacggggcgatcccctgcgagaacatgtagcgtaatgaaaaaatcatgccaattatgtaactcattgttttaacagaagcgtgaaacattcctgtgcacaataagtcgggcaaaaccagtatgccgcaccgttttggggcactgatttagtgcatgaataacaaagtagagatacagggtctatttagcgtaaaaatcgttgttaaaacaatctttaattaacgattgtgtgatgtaattattacaaataattcacttttgtcggaggggagtacaagacgtgtgcactatttaagtgcaaaacccctgtgccaggcaggggtatagggatgacttatatacctgtgtacatcaagttgcaggtgcgttcgcttcagtgaccgacggaagtcaggcttctgcggattcgctgcgtttgtaccttcctgcaactcgaagtattcagggtagagatagatttattcgatgttggattcgataaaccacaggaatttatcgaggtcgcgtgatgcggcggtaaagatatcggcagtgtcttcatctttggcttcaccaatagctttgcgaacatcattagcgacaacagcgtagcgatcggccagttcttttaagtgatcctgcacgttatggatgtcgagcggatagcttttcagtggagttttgctgttgataacttgcgtggtgcctaacgccacaccgccaagctgtacggcgcgctcggccatagtatccagatgatcggtcagtgcggtacggaagccatccagcatctcatgaacggcaataaagttagcaccgcgcatgttccagtgggcctgtttcgtgatcagcgacaggtcaatgaactggatcacctgacgattaagcaactcaaccgtcgcttttttatcgctctctgatacatcgttacgggtataaagcagattagacgcttttgtttttaccagtttagcggtactcataatctcatatcctcttgatgtttgtgtcccaggtaattaacgaaaataagtatagcaccggtttttaactttgcttttttgaatttacctatcactttaatagtacagacaagatttaatatttattttgattaaaaatcaattggttagacgagtttgctgtttggtgggtaataattctcattttaatgtaaaaaatgagaaaaaatatgacaaaaaatgacgaagtaatagcgcaataataaaaggtgaataacgaggtgatattctgcatgattatgcacatcatgcagaataagaaactattttacgtcaacttgtttaatttgcggttcgcgtcgaatcgttagggtagaacccattgaggcggcaatgatggcgcacagggccaggatttgtatgcccgtaagcgtttcgcccagaaaaatcatcccggaaacggcggccagcgcgggttccatgctcatcagcgtaccgaaggtgcgggttggcaggcgcgtcagcgcaatcatttccagtgaataaggcagcgccgtagaaagcacagcgaccgctaaccctaagggaagaatcgaccagtgccatagcgcgtcgccagcctgaactgcgccaatcggcacgaaaatgatggcggcaatcagcgagcctaccgccaccgtggccggaccatgttccgcgcctgctcgctggccggtaagaatatagacagcccaacaggcgccagcgccgagcgccaacgcggccccggtaagatcgacgtgagacatatcttgtcctaatggcagcaggaaccagagcccaagcacagccagtacgacccaaataaaatctaccggccgccgggatgaaaacagcgcgaccgccagaggaccggtaaattccagcgcgaccgcaatacccaacggcaccgtctgaatcgacagatagaatagatagttcatcccgcccagcgacagaccataaaacaataaaggcagccgctgctctttggcaaaacgcaaacgccagggtttgaaaaaggcgataaggataagcgttcccaacgccagacgaagcgccgttacgcccggcgcgccgacaagaggaaataacgatttcgccagtgaagcgccactctgaatagaggacatggcaatgagcaaaaccaaaatgggcaaccagactggtagtttacgtgttgaccccggcatcctttctcctgtcaaaaaatgtcagtacgagtaaaggtggcagtgtaatggaaattccccgcggcggttgagggttcgttgaaaaaaaatttccaggattccataaaatgaacttaaattgatggataaatagactgttagtttaggaataatctggatgaatgtatcgcgccgcacgcgcattattggtgcaataagccggaaaagtgatgttaattgaataagatagcgcgatatggaaacgttctgttacatgaaaggcgcccttagacaccgtgaatcgcaaagagtttcccattaatttttgatatatttaaaacttaggacttacttgaagcacatttgaggtggttatgaaaaaaattgcatgtctttcagcactggccgctgttctggctttttccgcaggtactgcagtagctgctacttctaccgttaccggtggttacgctcagagcgacgcgcagggcgtagcgaataaaatgagcggtttcaacctgaagtatcgttacgagcaggacgacaacccgctgggcgtaatcggttccttcacctacaccgaaaaagatcgtactaacggtgcgggcgattacaacaaaggtcagtactacggcatcactgccggcccggcttaccgtctgaacgattgggcaagcatctacggtgtagtcggtgtgggttacggtaaattccagacgaccgattacccaacctacaaacatgacaccagcgattatggcttctcctatggcgctggtctgcaattcaacccgatggaaaatgttgctctggacttctcttacgagcagagccgtattcgtagcgttgacgttggcacctggattgctggcgtaggttaccgcttctaatcacgtcggtgaaaatgaaaaatccgcctttcggggcggattttttttgcctgaaacgtgcattattttagtgaaaaaatatcgctgcccagatggttatagtccactttctgtaatttgaaattggtgatataaacgggcccggctttctgttccgaaataaatcgatagcgatttttgatctctttagcgctaattcctgtccattgcgagaaaaaactcaggaaatcgttcgcggaacggcgagctttaatgatccgatgcgctttactgtcgctggatagcaccataaacggcacctggaagttttgctggaatttgtcgtcatgcgccaggtactgtaccgctttgccgcgctctttaaacgccagcccgtgatcggagaaatagacgagcgaaaaactgtcgccgctatgacgaagctgagtatagagctgacggagcaaatcgtcggtttgcgtcatggtgtataaataacaagacgtctctttcgactggacaaacgtcgcgtattttccctgagtacggtcgcaggcctggggatgcgaccccattaaatgcaacacaatcaactgcggttgcgtgcgttctgtcgccaatacctgcgccgtcatggttaacagcgcttcgtcgcgagtatttttatccgcttcaaaatcgccgtttttcaggaaatgcgcttcatcggcgcgtttggcgatactggcgatggccgtgtcgtattcgccgatttgcccctgattggaaaaccaccatgtctgaaaaccggcgcggttagccagcgtgacgaaattatcctgatactgtggtttgttatccaccacgcgattgagcgttaaaccgagcgatttttgcgttgagccgctggcggcgatgtaatccataaagaagtcgccattcacatggctggcgaagggggtattatcccagtggccgccgaaagcgcccatggcatcccgtcgcgcgctttcaccaatcaccacgacatagatgtgatatctgggtttcaccgcagtaaccgtccagctatcttttatgccggatagctgcgccatacggtgctgctcttcaatgacttcgttgttattgacgataacgtctttggcgaagcgaaaaaccggatagccggtatcaataaccttaaaaacgccgccccacgccagattttgtaccggcgcgacgaaaaatgccgcgacgctaatcagcaggcacaggctgtcgaggctattccagcgcggcctggcctcttcttttcggcggcgaagcgcaataatacccagcgcaaaaataaaaagtccggtcaggtagctataccacgggaagatggtcaggatttcgctcgactcttccatattggtggagtgcagcgccagcagcgtattaaagttcggcgcgccgtaagcctggccaaagggaaaatagcaagcggctaccagcgaacagatgccgagcagcgctttttgtccgcggggcaggtagcgccagagcaacagcaacaggcaggtaaacgccgcggtataaagcaggctaaaggggtagccgagcgcgaggttaatcagcagcgactgtaaaaagtagaggcccgcccacgggcttacagcccgacgacgggccagaagtgaatcgataagggttgaattcatatgccactattgcaaaaacgccatgtgctaaccctggcgcgaagggtcattacctgcctgattatgcgtaaaaaaggtattgggttcgcaacggcgagtcgcaaaatattcagggctgccagaagatagagcgtgcgggtaagaaggtcaaccgccggaaagaaaatgttttgcgaagagaatagcaaaaccacaaaaaaacaggggaaatgggcgccatttccgttgaggatgcaaaataaagcggcgtaccgcaccgccgcgttatttcgtggaagggttatcctgctccggtttgccgttgatcatatcgcacaacatagagagcagcattaaccggactttaaagggagagtgactgaacacgcgtatacacctcttaaattcgttcatataaacctcctgatgtttctatcccatcgatccgtgagggatgtctgcattacatacagatatagcacaggctatgttttatagctattgctaaaacgttaattttttgtgcccagacaactctggtttacaatgagcgctctgtcagctgacgcgttaacgcgtcacagaaacgaggaagcaaaatgggtcgtcgcgcaggtacgccaacaacaaaaaaagtgacgcaattggtgaacgtagaagaacacgttgaaggatttcgtcaggtcagagaggcgcatcgccgtgagttgatagacgactacgttgagctgatttccgatttaattattgaggtaggggaagcgcgtcaggtggatatggcggcgcggctcggcgtctcccagccgactgtggccaaaatgcttaagcgcctggcatcgttaggatttattcaaatgatcccctggcgcggcgtttttctgacgccggaaggggagaagctggcgcaggaaagccgcgagcggcaccaaattgtcgaaaattttttactggtattaggcgtaagtccggagatcgcgcgtcgtgatgcggaagggatggaacaccatgtcagccaggagacattggatgcctttttggccttcacgcaacagcatggaacatctgcagaatgagtctggcctttttacgggcgctgcggcgtgaccgtttttttcagttgttgatcattgtggggatggcgttaagcctgtttgttccttttgcgccccgcgcctggcctggcgcgattgactggcacaccattattaccctcagtgggttaatgttgctcactaaaggcgttgagctgagcggctattttgatgtgctgggacgcaagatgacgcgccgatttcataccgagcggcaactggcgatgttcctggtgctggctgcggcggcgctgtcgacctttctgacaaacgatgtcgcgctgtttatcgttgtgccgctgacgataacgttaaaaaaactgtgcgcgattccggtcaaccgattgattatttttgaagcgttggcggtgaacgccggttcgctgctgacgcctgtcggtaatccgcaaaatattctgttgtggggacgctccggcttaacctttgctgaatttagcgggcaaatggcgccgcttgccgtcatgatgatgctgacgttactgctcctgtgctggttttgttttccgggtagggcgttacagtatcataccggtacgcgttcgccgcagtggcagccccgtctggtgtggagttgcctggcattatatgtcgtttttcttaccgcgctggagctcaggcaagagttatggggactggtgttggtggcggctgggtttattgtgctggcgcgcagggtgatagtcagcgtggactggacgctgctgctggtatttatggcgatgtttattgatgtccatctgctaacgcaattgccggcgttgcagggcgttttcaaccaggttggcgcactgtctcacctggggctttggctaaccgctatcggcctgtcgcagattatcagtaatgtgcccagtaccattctcctgctgaactatgtaccggcctcgacgctgctggcgtgggcggtgaatatcggcgggtttggtctgctgccggggtcgctggcaaatcttattgctttacggatggcgaacgatcgccgaatctggtggcgatttcatttctattcgctgccgatgctggcatgggcggcgctggtgggatatggattattgcaactgatgccgtaagagaagcccgatagtatctatcgggcttcgcaggcagagtctgtcagttcagacgaaccggcatcccggaacgatcctgaactgcctgttgtacgacggtctgatcaacgtcaggctcgttggtgacggccaggatactcttattaagcgtgatcggcaccgcttccttaccttcaaactgcgcttccgtcgttgacagcgggttatgcacctcaatgtaacggctaccgtccggctcggtggtggcttttaccggttcatcgataaactgcacgcgggtaccgaccggcacattttcaaacaggaatttgatatcgtcgttgcgcagacgtacgcagccgtggctcacgcgaagcccgatgccgaagttggcgttggtgccgtgaatagcatacaggcgaccgatgtacagcgcgtacaggcccatcgggttatccgggcccgcaggcacgacggcaggcagcggctcgccggcggcgcgatattcagcgtgcatttttgccgtaggcgtccaggtcggaccggcttttttacgttcaactttggtcgtccagttgataggcgtgtctttacctaactgaccgatcccaatcggcaggacgataacggtgtttgtgcctttcgggtagtaatagaggcgcatttccgcgctattgatgataatgccttcgtgtacggtatccggcaggatcagctgctgcggaatattcagcacggtaccgcccttcggcaggaaggtatccacgccagggttggcttccagcatgttggagagccccatctggtactccgcggcaaaatactccagcggctgggtattgccctccggaacggtgatgacctgattttgcccaattaaacggctaccatcggtaggcagcgggtaagtgactgctgaggctgttttacaaaaaccaactacagcgaaagccgccgcgaaaagcgttgttaatttcatattcatgttatgcgagattctgtgccaagcaggctagtaggttgagaattctgtcatgttgggagcgcattataggtgcattccagtaaacagggaattcagatgtgtacgaaatcacgtttttttcccttacggttcagtgtagccctttgtacagggcgcgatcttatttcagacttgtggcataataagcggtttgtcacatcttttttcaggataagcttgtgttagtttccagcaacgttaccatgcagttcggcagtaagccgctgttcgaaaacatttccgtcaaatttggcggcggcaaccgttacggcctgatcggcgccaacggtagcggaaagtccacttttatgaaaatcctcggcggcgacctggagccgacgctgggcaatgtttccctcgatccgaatgagcgcatcggtaagctgcgtcaggaccagttcgcttttgaaacattcaccgtacttgatactgtcattatggggcatggcgaactgtgggaagtcaagcaggagcgcgaccgtatctacgccttgccggaaatgagcgaagaagacggctataaagtcgccgatctggaagtaaaatacggcgagatggacggttattccgctgaggcgcgcgcgggcgaactgctgttgggggtgggcatcccgctggagcagcattacggtctgatgagtgaagtcgcgccaggctggaaattacgtgtgctgctggcgcaggcgttattctctaatccggacatcctgttgctcgacgaaccgaccaacaacctggatattgatactatccgttggctggagcaggtgctgaacgagcgcgacagcacgatgatcatcatttcgcacgaccgtcacttcctgaacatggtttgtacgcatatggcggatctggattatggcgacttgcgcgtctatccgggtaactatgatgagtatatgacggcggcgacccaggcgcgtgaacgtctgttggccgataatgcgaagaaaaaagcgcaaattgccgagctgcaatcttttgttagccgttttagcgccaatgcctctaaatcgcgtcaggcaacgtcgcgcgcgcggcagattgataaaatcaagctggaagaggtgaaagcctccagccgtcagaacccgttcatccgttttgagcaggataaaaaactgttccgtaacgctctggaagtggaggcgctgacgaaaggttttgataacggtccgctgtttaaaaatgtcaatttgctgctcgaagtcggcgagaagctggcggtactcggcaccaatggcgtgggtaaatctacgctgctgaagacgctggttggcgatctggacgccgatcacggcaccgttaaatggtcggaaaacgcgcgtattggttactacgcgcaggaccacgaatatgaattcgaaaatgacctgacggtgtttgaatggatgagtcagtggaaacaggaaggcgacgacgagcaggcagtgcgcagtattctgggccgcctgctatttagccaggatgatatcaaaaagcctgccaaagtcctctccggtggcgagaagggccgtatgctgttcggcaaactgatgatgcaaaagccgaatatcctgatcatggacgaaccgactaaccacctggatatggagtcgatcgaatcgctgaatatggcgctggaactgtatcagggcacgctgatctttgtttcgcacgaccgtgagttcgtcagctcgctggcaacccgcgtcattgaaattatgccggagcgcgtggtggacttcagcggcaactacgacgattatttgcgtagtaaagggatcgagtaagttattgtctgtaaccccgatagcgtcggggttacagaatgttaacaaggtaatttttattttttccgaatgcaatgtgaaaattatatatactcttagagcctatcccattagggctattttacttgccattttggacctgggcagtgctcgccaaaacgcgttagcgttttgaacgccgctagcggcggcccgaagggcgagcgtagcgagtcaaacctcacgtactacgtgtacgctccggtttttgcgcgctgtccgtgtccaaactggctgcgccaataacgcctggtgggataggctcttaatattctattttaaaattaaatgaaagaagaggatctatcataaaaattgcgaatatattttgtggtaaacatattgtaatgttattttctttataagaattcaagtgctattttatattcctttattgttcaacaaaaggaataaatatgagcattttggaacgcttttttggccgtaaagaaaaaaactcatctaatatacaaggtgttttagtagcgaatgctgaagttgataacccactaagtttagttgttgtatttgatactctcccggaaaataattcaaaagaactcacccgcttgttgcgtaattatcattccagtatgaaacaggcaacgtgtgaacttgtccctgaactggatttttttggtttagcaggatggggtaagcatgtaatatcgatggttggatttaaaacgccttaccctcaggaatcaatcgaacaatgcgtcgcgccagctcattatccccaggaagtaaaagagcaagtacgggcaaccagtgcaaatattattttatattataaggggtatgatacttcacctttagagcaatatgttgcgttggctgtggttgcaggtgcattaagtaacatgggggctgtcgctgtattaaatgaatcggctcacacttcattacctgcgggggtatttaagtctcaggagttgggtaagcatagtctggaaatgttgcgtgaaggtttcccgctgacctctctattttgtggatttgtgaaatatgaagttgaggatatcgaaggcgtatggatgcgtacctatggtgctgattgctttgggctaccagatttcgcagcacacgcacaaggtcatcacgaagggcaaaaatattctgatattttcaataatgttctgcgttacctgcttgaaagtggagcagaaatggctgccgggcataccatgcaagtcggtaaaacgacatttatgaaactgcgcgatccccttgacgatgaatattacttacaggggcctggaaccacattagtggttgaactgattgaagaagatgagtgtaatgctcattgagaaatcggggtaattgccccgactctcgttaaagtgtaaacggcactttattttccagcaccgcctgaatcacattcagtgcgccttcatgcttattattatcggtagcgtaacgggcgatttgtttaatgttttctgcggcattgtccatcgcaaaggaataatgcgccatttttagcatctctgcgtcattgccgctgtcgccaatcgctaccatattttgtggcggcagatcccagcgtttcagtaaccgcgaaataccgtttgctttatgcaggccgggaataatcagatcgataaaaccgaagccgctggtgacgggcttcataatgccatcgagcgtaacgtgtagtttgtcgatcactaacgggatttgttcatccggtaggttgagcgaaaacttgaacagtacgtcatcaatctcctgataatcttttacgggtttcaggcgatggtagtgttttgccatcagggtaacgaatgcttctggcgcattttcgctgacatatgcactttgcagaccgcaggcgacaaaattaagttgcttatctttcagcaactcgccaataataatccgcgattcatgtcgggtcagttcgccgtggaacagttgcttgccatgttcgtaaaccagtgcgccgttttccgcgacaaaagagatcgcatcctttagctcaggaaagaacgaaataagctggtaatactgattaccgctggcgacaacgaactcaatgccgcgctttttcagttcctgaaattacgccggagcgcgtggtggacttcagcggcaactacgacgattatttgcgtagtaaagggattgaaagctaaacactgacgcccggtggcgttgtgtttaccgggcctacgtatcctggcgcgtaggtccggtaagacgggtgcgcccagacaaagggcgcaccgcagttaagcgggcagggcggtacgaccgtcaaacatctatacctaatgcccgtttaccgtgaatattcagatcgcgcagcgtgaagcgcccttcccaggtggtttcatagtcctcgcgcgggaaatcgcccggtgatgcgcctgtctccagcgccgctttcaccttacgcgcataggccagatttttctcacacattggcgcggcaggaatgtacatcacattgccccagccctgctgattttcgacgggggcgacggagtggatgacatcgcaatgccaccacacggaatccccggcttccagcggcggaatgctggttaacgccgccatcagtaaaggatgccactgttcagaaatcggcagcacccggcccggcgcgacgccgcataattcatcttccgggacatcatccagcagcgggcgcagcagaatatacgccatcgcctccgggatagggacgacatgaagcaacccctgaccgggcagcatatcggagagcgcggtccagccctggaaggtgcgaaataccgagcattttgtggtgttatccaccgtgtactcttcaacgtcggtacggtgcgccgcattccacggatcgtactgctcgacgttgccgttaaacacgctggcgaatacctgctgataggctggcagcagccagcgttccagcgcgccggagtcggtatgcgcccccagtcctttggatgtggtgcccggcgggcggcggcggatgcgatccgggtaaataatgctgatatccggattaaaccatcgcttgccgtcgtgctctacctgccatagacggttgaggaacgactgcgccagcgccatctcttcactttggcgggcctgcatttgcgcctgcgaccagtagacaggatagatttcaggccgggaggcgctcagcgtaccgaaaaaattatcccccggtcctttatacacctcgtcaaaatggttcttgtccagataatcgagcatcgactggtcccatgccagcgcctgttcgcgtggaaaatgacctttaatcaccgcgcacccgcggcgcttaacctcggcgcgggtggcatcgctaatgttgcccatcgccagttcgctaaaagggataattggccataccggctgcccctgcgccttcagatcgttaatttccgccacccgggctgctatggtggcgctcaaacggtcgaacaccgcctgtacgtcgccgatttgcgcgcgtagcgcctgcttcatctgacgaatggccgcttttgggtcggcgggcagcgtttcgtgggtaaaaggagtcgtcatatcaacctcatcatctttcgttcgaaagtaaaattagttacatctgatactttaagttaaaataaggttaatgcaagtttaaaatattgcaggagcgcacaaggagagaagcgagaggaaaacgtaaggtggccaggacgccttaatgtcttatgcggctattcctttcgttcagccacttttcattcgaaataaatttgtggttctgctcacattgttattaaaatgtttctggtcgcagttacagccaggagcttaagtatgaccgttaacgttgtcgttacagatatggacggcacttttctcgacgatgccaagcagtacgatcgtgtacgcttcatggcgcaataccaggaactgaaaaaacgtaatatcgaatttgtggtcgccagcggtaatcagtactatcagttgatctccttcttccccgagctgaaagacgaaatttcctttgtcgcagaaaatggcgcgctggtgtatgaacatggcaagcagttgtttcacggggagctaacccggcatgaatcgcggattgtgattggcgaactgctgaaggataagcagcttaacttcgtcgcctgcggtctgaaaagcgcttatgtcagcaaaaacgctcccgagactttcgtggcgctgatggccaaacattatcaccgcctgcagccggtaaacgattatcacgacattgacgatatcctgtttaagttctccctgaatttgcccgatgaacaaattccgctggttatcgacaaactgcacgtatctctggatggcatcatgaagcccgtcaccagcggcttcggttttatcgacctgattatcccgggactgcataaagcgaatggcatcagtcgtctgttaaagcgctggaacaggtcgccacagaatgtcgtcgccattggcgacagcggtaatgatgcggaaatgttgaaaatggcgcattactcttttgccatgggcaatgccgcagacaatatcaaagcgctttcacgttatcacactgatgataataaccatcaaggcgcgctcaacgtcattcaggccgtgcttgacggcaccgatcccttctgattaacaggcctgcgtaggcctgttaaacgtagcgccatcaggcagttcggacatattgccgatggcgccagggtaaattacagcatatgttcggtacgggcgatgatatcgtcctgcgcatccggcgacagcgcggtgaagaaggcggagtagcctgccacacgcacgaccagatcgcggtactggtctggatgttttttcgcatccaacagcgtttcgcgtgacacgatgttgtactgaatatgccagcctttatgcacctcaaagaacgtccgtagcagaaccatcagtttctgtttgtcggattcgttttccagcgtcgttgggttcagtttctggttgagcagcacgccgccgagaatggaaccggtaggtaatttgcctacggaaccaatcaccgccgtcgggccgagatgatccgtacctgatgcagggcttgcgccttccgccagcggtgtatgcgctttgcgaccatccggggtagccatagtcgcggcgccaaatggcacgtttgctgagatagaggacgtaccggcgtaatagttgccgccgacagggccacgaccgtagcgcgggttatgatattgcttcagctcatcaatataggtctgataagcgcgcgccagcagcgtatcgacggtatcatcgtcgttaccgtacttcggcgcgccgttaatcagacgctggcgcagctgctcatgggtcagcccgtcaaagtcatcggccagcgcggcggcaagctgctgttgaccgataacgccctgttcgaagaccagttttttcacagcggcgaggctgttgcccaggttggcgataccgacctggagaccggatacccagtcatatttcgcgccgccttgcttgatacttttcgctcgctcaatacagtcatctaccagcgctgagcagaggatatcgtggacgttctcttccaacatggtgtcgaccacatactcaatttcaatcgatttgcgcgtgtagtagcgaatttgggtatcccaggcggccatcacttcgtcaaaattgttaaagttgcctgcggagagcgccttttcctgcggcagaaataccttgccgctggtggcgtcgcgaccgccttccagcgccgccagcatgacgcgggcgaagttaataaagctcatgccggtgcagcgataaccccatttcccgccgacggcggtttcgatacagccgatcgccgcataatcgtaagcgtcctgcggttcgatccccaacttgataaattccgggatgacgatttcatcattgttaaacgccggcatcccaaagccgcagcggatgacctggacgcaggcgtcaaggaaatcgttactcattccggcgtgataacgcacactgaggttgggctgggtagaacgcagacgtccacaggactccagaatggcgtaagacagcggattcactgcatccattggctgaccgttgataagtttctgaccgccaatggtgacgttttgatacagcgggctgcccgcggaggctttagagtgcgaaccggagcggatcttgtttacttccagcagtttcagccagcagctgtgcagcagttcaatggcgtgctcacgatccagcgtctggtttagttcgacatcgcgacgataataggggtaaagatactggtccatacgaccaaatgacaccgagtgaccgttagactcaatttgtagaatcagttggatgaagtagcacaattgcagtgcttgccagaaggtctgcggcggttggtgggcgatcacctcgcagttttcggcgatggtaagtagctctttacgacggctttcacgggactcttcgcccgccatctggcgcgccagcgcggcaaagcgcgtgatatgctggcttaccgcgtccagcacaatatcaatcgccttcaggaactgctcgccatgcagatcttccagcacggtcaggttgatgcgtgagcggcgctcggcgactttatcgcgcaggccataaagccctttttccagcagcagcgggaagttcaccgccaggtgcgcatcgccggaagtcatattgccttcggctttgataatgccagtcgccagaagccctttttgttcatcggtaaacatgccgtagcagcgatcctggacggtttgaccgcgccaccacggacagacgtcgtgcagaatacgtttgttttcttcacttacggaaaaacctgcgccgggccggtccgccaggtcgtcgatctctttttcaatccacgagacggtatattccgggaaaatcggcgcggcgcggacttcacttgcctggttgccgacgatcagttcatcgtgttttatccagatagtgcgttccgccaggtgatgggccagcgccagcgcacggcgtaccggaatcggtttatccagatgctgctggtacatttcggtataatgctgcgcgcgctcggtacagaccggcggtttcacgatatgtaccagcgcggttttgtgcgccttaatgcggtcactgagcgtgtccagtttcagttgggtcatgataattatcctcgtagggtcgcggttaaacctttttggcaggcgtacttctgggcaaaatcaagtaacgccggcgcatccagtggtttatccggggcatgatagggttgactgagtaagtggtatttattgatgcccagcgtgtggtagggcagaaaatgaatttccccgacgtgcagttcgtcggcggcaaagtcggtaatggctttaatggcctcctcatcggcattaaatccctgaatcagcgggacgcgaatcaccatttttttgcccgcggcggcgagtttcctgagattttccagcacccgcgaggcgctgccatcggtccactgcttaaacggcccgtcggcgacatgcttcaaatcagccagaaacagatcgatataaggcagtgagggcgcaatgtatttccatgggacatgcagacaggtctcaaccgcagtatgaataccggcgtcatggctggctttaaacagctctgccgccagttccggctgcataaacggttcgccgccggaaagcgtaagaccgccgccgctgcgatcgtaaaaaggtttatcgcgcagtaccgtcgccatgatctcatccacgctttttatttcgccgcacacggttaacgcctgtgtggggcagcaatgcgccaggatggaaaaatgggcgtcggtcagtttctcgcgatggatgagcaggccgtttagcgcgcgctcaatgacgtccggcgcggcttgcgcgcacaggtcgcatccttcgagacacagccgcgcgtcgtataacagatcctgagcgcgggcgcggctttccgggttctggcaccagcgacagcccaacgaacagcctttgagaaatactacggtacggataccggggccatcgtgggtagaatagcgctgaatattgaagatcataaacggcctctcttatttcatataaagattaaattactttcgaatgaaagctatcttgatgtgcgtcaacgaatggagaggttctgacaaagaggcgttaaatgaggtacaacatcacggtttgaggttgtggtatggcgtttaagatgatgccgcgctgcttgagccgatcgtcagtcggagcttgggtaagctggctttgcgtctgatgacagtaattatctgttgatacagcacggccataaaccgtgctttggtatgtttatccgtaaagtggctactgcccgcagacctcacagccggggttgcgcattaacttcatttcgcggaactgacaggtcatcgcatcgtacatgacgatttttccgctggcaggctgaccgtaatgcgccagtagcttaatggcctccattgcctgtagcgaaccgatcacgccaatcagcggcgccatcacccctgcctctacgcaggtcagagcgttttcgccaaacagacggctcaggcagcggtaacagggttcgttttcccgatacgtaaagacggtaacttgtccttccatacgaatggccgcgccggagattagcggcactttcgcggtatagcacccggcgttaagttgattacgtacgctaacgttatcggtacagtccagcaccagcgaatgcccggcaatcaggctggtcatagcgtcgtcgtccagccgcgcgttaacgggcgtaatggtaatatgtgggttgatacgcgccagcgcgtcgcgggcggactctaccttcggctgcccgaccgtggcgtcgctgtgcaaggtttgacgctggagattggaaacggaaacggtatcaaaatcgagtagcgtcagttgcccgacgccagcgccagccagatactgcgttgccgcgcagccgagcccgcccagcccgaccactaatacccgcgcatcttttaacgcttcctgcccttcaaaatcgaagccgcgcagaataatttgtcggttatagcgcagcatctcctggtcgctaagttccgccattacaggcctccgaacagagcattaaacggctcgacttccacccattctcccggctcaacattgccgcgttcacgctccagcacaataaagcagttgcccagactaaacgagctgaaaatatgtgaaccctggtgtccggtggtcgtgacctccagttcgccgttggcgctacgttgcagaatgccgcgctggaaatcgagacgccccggcgttttcttcaggcgagatgctgtgcgtacacgctggcgcggcggcactgcgcttgccgtgttgccgccaagcttcgccagtaagggctgaaccagttgataaaacgtgagcgccgcagagactggattccccggcaggccacagaaccagctattactgagcttgccgaaggcaaacggtttgcctggcttgatagccagcttccagaaggcgatttcgcccagctcctcaaggatggttttggtatagtccgcttcaccaaccgagacgccgccggagcttatcactacatcggcctggctgtcggcgtcgataaacgcggcgcgaagcttaccgggatcgtcaggaataatgcctaaattgatcacttcgcagccaagctgttgcagcatcaaatgtatagttagacggttagtgtcataaatttgtcccgcctccagcggctggcccggaagctggagctcgtcgccggtcgagaacagcgctacgcgcactttacgtacaacctgcgcatcggcaattcccagcgacgccagcactggcagttcggcagtagtcaggcgcgtaccggccggaaagaccaccgcatcctggcgaatatcctcgccgcggcggcggatgttttgtccgcaacgaacatcggcggtaaaacgcacgccgtcatcggtttgttccgtctgctcttgcatgactaccgcctcgcaacctgccggtaccggggcgccggtcataatgcgaatgcaggttcccgcaggccactctccctggtagggctgaccggcaaatgctttgccggcgacgggcagcggcttatcggcggacaaatccgccacacgtaccgcataaccatccatagctgaattatcaaagccggggacatcaaggggagatacgatatcggtcgccaggatgcggccaaagcagttcaccagcggcaacgtttctacggcggtgagaggggtaatacgtgaaagcatctgggtcagcgccgtttcaagcggcatcaatccggcggaaaattccatgaacatactcctgcgaggcaaaatcgaatccggctattatgtcagaaaacagtggcgggcagtatgctacctcggtcttagagacggccttgcgcctttacataccttacgcatctttctatattcaaaaatcgaatgaataactcacaacaattctgatagttatagtaaaagttgtgtgccaccgtaatggaccctaaaaatgaataaagcagtgattgcgattcacggcggcgcaggcgcgattgctcgcgcgcaaatgagccatgagcaggagctacgctatatccaggcgttgtcagagattgttgaaagcgggcaaaagatgctggaagcgggtgacagcgcgcttgatgtagtgacggaagcggtgcgcctgctggaagcgtgtccgctcttcaatgcgggtatcggcgcggtctatacccgagacgggactcatgaactggatgcctgcgtgatggacggcaataccctgaaagccggagccgtcgcgggcgtgagtcatgttcgccatcctgtgctcgctgccaggctggtgatggagcgcagcccgcatgtactcatggtgggggaaggggcggaaaactttgccttttcacaggggatggcgcgcgtttcgccggatatcttttccaccccggcgcgttacgagcaattgctggcggcgcgtgcggcgggtgaaatggcgctcgatcacagcggcgcgccgctggacgaaacgaaaaaaatgggtacagtcggcgcggtggcgcgggataaattcggcaatctggcggcggcaacgtctaccggcgggatgaccaataaattgcccgggcgcgtcggcgacagcccgctggtcggcgccgggtgttatgccaacaacgccagcgtcgccgtttcctgtaccggaacgggagaggtctttattcgcacgctcgcggcttacgatatcgccgcattgatggaatatggcggactcagccttgccgacgcctgtgagcgcgtggtgatggaaaaattaccggcgctgggcggcagcggtggattaatcgccgttgatcacgaaggtaatgtcgcgttgccgtttaacagcgaagggatgtatcgcgcctggggatatgccggggatacgccgaccacaggaatttaccgggaataaggagccgcaggtgccgcacagcgatgaactggatagccgcgatgttctgtccgtcagtggcctgaatatcgcgtttcaccacgaagggcaacaggtagacgccgtgcgtaatgtgtcattacgcctgaagcgtggagagactctggcgattgtcggcgagtcgggatcgggaaaatcggtgacggcgctggcgttaatgcggctgattgagcagtcgggcgcgaacgtgcgctgcggcgaaatgctgttgcgtcggcgtaatcgtcaggtgattgagctgtctgagcagagtgacgcgcagatgcggcgtgtgcgcggcgcggatatcgccatgattttccaggagccaatgacctcgctcaacccggtatttaccgttggcgagcaaattgccgaatctattcgtttgcatcagggggccagccacgaagaggcgctggcggaagcgaaacgtatgctcgatcaggtacggatcccggagtcgcaggcgattttatcgcgttatccgcatcagctttccggcgggatgcgccagcgagtcatgatcgcgatggcgctatcctgccgtccggcggtattgattgccgatgaacccaccacggcgctggatgtcactatccaggcgcaaattctgcaacttatcaaagtgttgcagcaagagatgtcgatgggcgtgatttttatcacccacgacatgggcgtcgtggcggatatcgccgatcgcgtgctggtgatgtatcagggcgaggccgtggaaaccggcagcgtagagcagattttccatgcgccgacgcatccttatacccaaacgttactggccgccgtccctcagcttggcgcgatgcgaggccactcgctgccacgccgtttcccgttgatttccgctgacgaaccggccctttatgaatcgcagattgagcaagacacggtggtggaaggcgaacctattctccaggttcgggggctggtgacgcgattcccgctgcgtagcggtctctttaaccgcgttacgcgtgaagttcatgccgttgagaatatcagtttcgatctctggcccggcgaaacgttatcgctggtgggcgagtccggtagcggaaaatcgacgaccggacgcgcgctgctgcggttggttgaatcccggcagggggagattatctttaacggccagcgcattgacacgctgtctgcgggtaaactccagccgttgcgccgcgatattcagtgtattttccaggacccttacgcctcgctcgacccgcgccagaccgtggggtattccattatggaacctttacggattcatggcctggggcagggggacgctgcggcaaagcgcgtggcctggttgcttgagcgtgtcggattacgtcctgaacatgcctggcgttatccgcacgagttttccggcggtcaacgtcagcgcatctgcatagctcgcgcgctggcattgaatcctaaagtgattattgccgatgaggcggtctccgcgctggatgtttccgttcgcgggcagatcattaatttactgctcgatttacaacgggaaatggggatcgcctacctgtttatttcgcatgatatggcggtcgtggagcgaattagccatcgcgtggcggtgatgtatcttggtcaaattgttgagatggggccgcggcgcgccgtttttgaaaatccgcagcatccttatacgcgtaaattgatggcggcggtgccggttgccgatccctccagacaccggccgcggcgcgttctgctatcagatgatatacccagcaatattcataaacgtggcgaagagacgcccgccgtttcattacagttggtcgggccgggacattatgttgcgcggccgctgcaggataatgcgctctcgcgcttataacattcagacaggcagggtttcaggagaacaacatgacgcaatttattacgcataaatggctggcggcgctgggactggcctcatccattgcggcttttccggccctggcggccaaagatgtggtggtggcggtagggtctaatttcaccacgctcgatccgtatgacgccaacgatacactctcgcaggcggtggcgaagtcattttatcaggggctgtttggcctggataaagacatgaaggtaaaaaacgtcctggcggaaggctataccgtttctgatgacggtctgacctacaccattaccctacggcagggggtgaaatttcaggacggcgcggattttaatgcggcggcggtaaaagcgaatctcgatcgcgccagcaatccggataaccacctcaagcgttataacctgtataaaaatatcgcaaaaacggaggttgtcgatccggcaacggtaaaaattaccctgaaacagccgttctccgctttcattaatattctggcgcacccggcgacggcgatgatctcgccgcaagcgctggaaaaatatggcaaggatattggttttcatccggtcggtaccggtccataccagcttgaaacctggaatcagaccgactttgtcaaagtgaaaaagttcgccggttactggcagcagggcttacccaagctggattctattacctggcgtccggttactgacaacaatacccgcgcggcgatgctgcaaaccggcgaagcgcaatttgcttttcctatcccttatgagcaggccgcgttactggcgaaaaataaaaacctcgaactggtcgccagcccgtccattatgcagcgttatatcagtatgaatgtgacgcagaagccgtttgataatcctaaggtgcgtgaggcgttgaattacgctatcaatcgtcaggcgctggttaaagtggcgtttgccggatacgccacgccggcgacgggcgtggtgccgccgtcgatagcctatgcgcaaagctatcagccgtggccctatgatccggctaaagcgcgcgaactgttgaaagaggcggggtatccagacggtttcagtaccacgctgtggtcatcgcacaaccatagcaccgcgcaaaaagtgttgcagtttacccaacagcaactggcgcagattggcgttaaagcccggataaccgcgatggacgccggccagcgcgccgcggaagtcgagggcaaagggcaaaaagagagcggcgtgcgaatgttctatacaggctggtcggcgtcgacgggcgaagctgactgggcgttatcgccgctcttcgcatcacaaaactggccgccgacgcagtttaataccgctttttacagcaacaagcaggtcgacagcgatttggcggcggccttaaagaccaacgatccgcaggagaaaacacgattgtacaaagaggcgcaggatattatctggaaagagtcgccctggataccgttggtggtggagaaattggtttctgcgcacagtaaaaatttgaccggtttctggattatgccggataccggtttcagctttgacgatgcggatttgaagtaagtaatgcgatggggctggatggcgcgcgcgttgtccgccatccggtaaaaggttcgtgtgatgcttaactatgttctcaagcgcctgctgggattaattcctacgctgttgattgtggcagtgctggtgtttttatttgttcatttgttgcccggcgacccggcgcggctgatagccggaccggaagccgacgcgcaggtgatcgcgctggttcgtcagcagctggggcttgatcagccgcttcatgtccagttttggcattacatcacccatgttttacaaggcgatttcgggacgtcaatggtttcccgccgcccggtttctgaggagatcgccagccgctttttgccgacgctgtggctgacgataaccagtatgatatgggcggtgctgtttggcatggcgatcggcatcgccgccgccgtgtggcgtaatcgctggcctgaccggttaggaatgacgcttgccgtgaccggcatttcttttccggcttttgcgctgggaatgttgttaatgcagattttttccgtggatctgggctggctaccgaccgtgggggcggatagctggcaacattatattttaccctccctgacgcttggcgcggcggtggcatccgtcatggcgcgttttacgcgctcctcgtttgtcgatgtcctgagcgaggattacatgaggaccgcgcgggcgaaaggcgtcagtgaaacgtgggtggtgttaaaacatggcctgcgcaatgcaatgatcccggtcgtcaccatgatgggactgcaatttggctttttgcttggcggctcgatcgtcgttgaaaaagtgtttaactggccggggcttgggcgattactggtcgactccgtcgacatgcgcgactaccccgtgattcaggcagaagtgctgctgttttctctggaatttattcttatcaacttagtggtggatgttctctatgccgccattaatccggctatcaggtataagtaaggatgcgattatttaactggcgccgtcaggcgattttacatgctatgccggtggtaaaacccgaccagatacgcacgccgtggcgggagttctggcgtcgttttcgccgccagcatgtcgcgttggtcgccgggggattcgtactggcgttaattctggtggcgatttttgcccgttggctgacgccctacgatgcggaaaactattttgactacgatagcctgaacaatggcccctctttgcagcactggtttggcgttgactcgctgggaagagacatctttagccgggttctcgttggggcgcagatctcactggcggcgggcgtgttcgcggtatttatcggcgcgataatcggtacggtgttgggattgctggcgggatattatgaaggctggtgggatcgttttattatgcgcatttgcgatgtgctgttcgccttccccggcattttgctggcgattgccgttgtggcggtgttaggcagcggtattgctaatgtgatcgttgcggtggcgattttctctattccggcgtttgctcgtctggtgcgcggaaataccctggtcttaaaacagcagacgtttattgagtctgcccgcagtatcggcgccagcgacacgacgattttgtttagccatatattgccgggaacggtctcgtcaattgtggttttctttacgatgcgtatcggtacgtcaattatttccgcggcaagcctgtcatttctcggattaggcgcgcagccgccaacgccggagtggggagcgatgctcaatgaagcgcgggcggatatggtcatcgcgccgcacgtagcgctcttcccggcggtggcgattttcctgactgtgctggcgtttaacctgttaggcgacgggttgcgcgatgcgctggacccgaagattaaggggtaagccagcccggtggcgttgacgcctggcgggcctggaacgggctcgtcaggcgggataacacatccggcacccgcgccgggggaggtggcgttaaacccgactgccccacaaatcatattcgtcggcgttttccactttcacgcgcacgatatcgcccggcttgacgttggtttcgccgttcaaatagaccgcgccgtcaatttccggcgcatccgccatgctacgcccgatagcgccttcttcgtcaacctcatcaacgatcaccagaatttcgcggcccactttttcctgcaagcgctcagcggagatttgctgttgcagttgcataaagcggttccagcgctcttctttcacctcttccggcacctgatccggcagctcattcgcgcctgcgccttccaccgggctgtacttgaagcagcctacacgatcgaggcgcgcctctttcaggaagtcgagcagcatctggaagtcttcttccgtttcgccggggaagccgacaataaaggtggagcgtagggtcagttccgggcagatttcgcgccactgcttaatgcgcgccagctggcggtcaacggaaccgggacgtttcatcagtttaagaatccgcgggctggcatgttgcagcggaatgtccagataaggcaggattttgccttccgccattagcggaatcacatcatcaacgtgtgggtaggggtagacgtagtgcagacgtgtccagacgcccagttttgataactgttcgcacaggctcaccatactggttttcaccggttcgccattatggaatccggtgcggtgcttcacatctacgccgtaggcggaggtatcttgcgaaatcaccagaatctctttgaccccggcatcaaccagacgtttcgcttcgcttaatacgtcgccaatcgggcggctgaccagatccccgcgcatcgacgggatgatgcagaacgtgcagcggtgattacagccttcagaaattttcagatacgcataatggcgcggcgtcagttttacaccctgttccggtacgaggcttaaaaatggattgtgcttcggcttcggtacgtaatgatgtacgtgctgcagaacttgctcatagctatgcggcccggtgatttccagtactttcggatgcacttcgcggatctgatcttcttttgcgcccaggcagccggtgacgattaccttaccgttttcgttcagcgcttcgccaatggcttccagtgactcttgtaccgcgctgtcaataaagccacaggtattaacgataaccatatccgcatcgtcatagcgtggcacaacgtcatagccttcggtacgcagctcagtcaggatgcgttccgaatcaacgaggtttttcggacagcccagggaaacgaagccgatctttggctggtgggttacattactcatagcttaaaaagtgttcatttattggaatggtcagggcagggattctacagatatccgaacaaaaattgtatcgcaatctcatcaggagcggcggcatcaaccgttgtggttatcagcaaaaggtgaaaaagggcaattctaagaaaattcttgatctctgacacccctttgtctaaaaaacgaccatactattaagttgaaccctggtagaaaagaggaggaaaaaaggtatggtcgttgacagactgagaaccgatcttctcaacaagctgataaacgcgcgtatcgatcttgccgcttatctgcaattgcgaaaagcgaaggggtatatgtcagtcagcgaaagtgacactctgcgtgacaatttttttgaactgaatcgcgagctccacgatcacgctttacggcagggactgcatctcgatcaggaagagtggaacgcgctgcgccgtgccgaaggcgcgcttgcagccgccgccgtttgtttaatgagcggacaccatgattgtccgacctttattgccgtcaacgcagataaacttgaaaactgtctgacaactttgacgctgagtattcagagtctgaaagcacattcaccgcttacacaggtctgaacaaggggaggcgactcctgaggaatccccagcaaaccaagacaggcatagtgttatgtgatctaattgattgcgctaacactttcaaggaaatcatcactatgcctgctcgttcattatgccaaaaatcctttaaaaatatactggagcctttgcacctttaccgccgtcaatctctgattgaggctaccagtgtagtgattaacggtgcatctcttacacttattcagtattgggcgtgatttgtcaggagtagcatcggtcaggcacaagataaaacgtatcgatcgacttcggggaaagtctcacttgcagaatgaagtttcagatactttttcagcgtgttactaaaaaatcacggagggaatgacccgggttgtcatgctctcctatatgccagcctgttttccgccaaaggtgactaaattcggttcaccagacaatcgttgatgttcttagggaacggtatagtcgaattcactcctgaaacaggtacggaatgtcggccgtttactattctgaaacgttatttatatcaaataattaaattttatttttatctttgttattgtaacaataaattacatgtttctttctgttatcagcgaacctgaaccaattttaatggggggttagataaaagctaattcagaaaattatttttttaagatatattgaattatcagatgctccattcaaatgagagacgagaatgcaaacgttagaacggttttttcttttcgttacgggggaccaacctgaacgatttgaaaaagcaaatagcagttgtgctgatagcgtaatccttgatttagaaaatgcggtgtcatctgagaaaaaaataattgccagagaaaatgctctgaatttcatgagtaatgatgaaaaagtactgattgctgtacgtgcaaaaattgtaataacttcacgcctggctggatcatatccttctgttgacggtatcacaactgaatttatgaaaaacgagttgacaatacaaaatgctattcactcctgtaaaatggggttcagtggcaaggtatgtattcaccctccacaaatttcacatgtaaacagagcattcagctatttaaaacaagaaatcgagtgggttccccagattatgcgactggctcaatatccccatggagcgttcagtcatgaagggcaaatggtggataaaccgttactggaaaaagcaaaaaggattttggctcatagcatttagtaaatatatgaaggagtcaccaatgaaagctttagtttgtgtaaaacaagttgtcgatcataacgttagaattagaataaagcgagatcattctgatgttgatatttctgattcaaaactcagtatcaatccatttgatgaaattgcagttgaagaagcagtacgtttaaaagaacggggattaatcagtgaggttgttgtagtgtctataggaaacacaggtgtaggggatgtattgcgtacagcactggcagcaggggcagacagggcaatacacatattaacaaaaaactctcttacaccactaattgtggccaaaactatcaccgctattacccggaatgaaaaacccgatattatattattaggcaagcaagctattgacgatgattgtaatcaggtaggccaaatgctggcagcattactcgatcttccccaagccactaatgttagtgaaattactatttctgataattcattaactgctgttcgtgaggttgatggaggattagaaacgttaaatttatccctgcctgcagtactcactacagatctacgtctgaatacaccgaggaatatcagcttgccgaatgttattaaagccaaaaagaaacctgttaaggagatagatttcgattcacttggtattaacccgtcatccagattgactattattaaagttgatgagccagcaagaaggaaagcaggcataatcgttccagatattaacacgctgctagataaattaaaaaacgaagaaaaagtaatttaaggaggaaaatatggcttctttagttattgctgaacataacggcaatactcttttaccttcaacactcagtactatcactgcggcaaaagccattaatagtgatatagatatacttatgttaggatatggtatagaaagtattgcagttaaagccagtcatattcaggggatatccactgtatttgttgctgacagcccactattcgaacaccttctggcagagaatgtggaaaaacagatcagctattttttgaatagtgggaaaaatcattatcagtccattctttttcctgcaagctcttttggaaaaaactgtgcgccacgcttagcagcaaaacttgatgtatctcagattagtgatattacgcgtgtcattgatcaacatacctttgaacgtccaatctatgcgggtaacgctattgccacagtacacagtgatgatgaatataaagtgataactgttcgtcctacctcatttgcggctgcggttgcggaagatgagggaaaagcccccattgaatttacagaggttgttcttggttcagatcaggtaaaatttattagccaacatgttaataaaagtaaccgtccagacttacaatccgccagagttgtagtatcaggtggacgaggagtaggaagtgcacaggcattcaaagaacttgttgataacctggcagataaattaggcgctgccgtgggggcaagccgggctgctgtagatgctggttatgcaccaaatgattatcagattggccagaccggaaaaatcgttgcgcctcaactttatattgctctgggaatttctggcgccatacaacatcttgccgggatgaaagagtcaggcgtcattgtcgctattaataaggatcctgacgctcctatcttttctattgcggattatggtttggtagctgatattttcaaagctgtacctgaacttatcgataaattataaatcatattttttcctccttaaaggtaacttttatgcaatatactgatattcaaatttggcagcctggcattctgcgcaacaccgattatcttaaccccggtcccgctaagctgctggccgccactctggataaagacatcaaaatctttaaagagggggggcgttctgccagaattatggcactggctctattttcttcctgtcgaccgccagtcagatctatctgctgatggtcatccgataaaaggtcattttctaccccctgttggcgctggtttattgaggaaaaaattatgaaaagtattgaaaaggataaatatcaggatattcgtgatgcggttcgttcattatgtagtgaatttgatgataaatatcaccgtaagatagatgaagcaaaagcctatcctgaagagtttgttaataaactaaccaaagctggttggctggctgcgctcatcccggaggaatttggagggtcagggcttggtttaactgaagcatctattatcatggaagagatcaatagatcgggtggaaactctggagcctgccatggtcagatgtataacatgaatacgttgttacgtcatggatccgataaacagaaagaattctggctgccacggatagctactggtgaatggcgcctgcagtcgatgggcgtcacagaacccacagcaggtacagataccaccagaattaaaactacagctgtaaaaagagaagaccggtatgtgataaacggacaaaaagtctggatttcacgtgttcaacattcagactggatgattcttctggttcgaactactccgcttgcaaatgtaaaacgtaaatccgaagggatgtctattttcatggttgatattaaagaagctatgaaaaatggaatgacagtacgacctattcccaatatggtcaatcatgaaaccaacgagctcttttttgacaacctggaaattcccgaagaaaatcttattggtgaagagggtatgggttttcattacatacttgatggtttaaatgcagagcgtaccttgattgcggcagaatgtataggcgatggatattggtttatggatcgtgttacccgctatacctgcgagcgtgaggtttttggtcgtcccattggtcagaaccagggggtgcagtttcctattgcagaagcatttattgcagtggaagcggctaatctgatgcgttttaaagcgtgcgagctttttgatcagcatcttgattgtggagcacaggctaatatggcgaaataccttgctgcgaaagccagctgggaagcagccaatgcctgcctgcaatttcatggtggatatggttttgcctgtgagtatgatatcgaacgaaagtttagagaaacacgtttatatcaggttgctcccatatctaccaacctgatcctgagctatatcgctgagcatgtgctggagatgccacgttcattctgatgtcaaatcaattggaaaaatattatgaaacagttacctctgtccggagtcattatagtctcgattgaacatgtcattgccactcccttctgtacccgacagttggctgattatttctcgcgggtaactataatagaatgccaagaaaacagggacttttcctgcaattatgatgaacggcttaaaaatgatttgtgtatattctttttcatctgagggagaaagctaaatataaatgttatggaatgcttcatcatcatcgacatttttttaatagttgataactggctatatagtcttataggcacctttttctaaggttgaacattcctataccatttcatctgttttatcactatgatatttatttcattggttacaatatgaatgcaattttatttacataatatagctgttcctacggtgctgaaaaattaaggagttaataatgaacgatacactttctaatacccagcaatcacgtgagacaatagaatgtgatgttcttattgtgggagcaggacccgccggattatctgcagctcttaaacttaaattacaggcaaatgacgcaggaaaagaactgtccattatcgtccttgataaaggagctgagcctggttctcatattctcagtggggcagtcatggatccccgagcgctgaatgaactaattcctgattggcaggaaagaggcgcacccattaaacagcctgttactcaggataaattactgttactgacgaatgaaaaatgtattaatttgccggatgcattgattcctgataattttcgcaaccatggaaactttatcgtaagcctcggtaatctcattaaatggctcgccggtcaggcagaaacgtcaggcgtggatatttatgcaggcttttcggcaactgagatactgtatgatcaggatactaacattatcggtgtagtaactggtgatatgggacgtcatcgggatggcagcaagaaagaggggttcctgagtggaatagaaattctggcaaaatatacaatttttgccgaaggggcccgcggtagtctggctaaagaactgatcaaaaaatttcatcttgatacaggcaaagcaccccagagttttagcataggcataaaagagttgtgggaggttccatcagaccagtcccatccggggcttgtaattcacaccacaggttggcctctggataaagagtcgttcgggggtgggtttctctatcatcttaatgataataaaattgcactaggtttggttgtgggacttgattattcaaatccctggttaagcccttttcaggaaatgcagcgcctgaaaacacacccttctatacgcaaatacattgaccggggtaagcgtattggttatggcgcaagagcaatcaataacggcgggattgcgtctatgcctgatccctgtttacctggtggtctgctgattggttgtaatgccggtacgctcaatgcaagtagaatcaagggcatccatacagctatcaaaagtggcatgatagcggctgacgctatatttaatgctttgctggacaacaggaaaaacgacatactgacagaatatcaaacattactgcgacagagctggctttggcaggaactggaaaatggtagtaatttcaaaccctggtttaaaaaagggcgtgtgataggttttattatgactggcattgagcattggctgcttccccgaatgggtataaaaaaaaatcccctggcgtgtaaaaaataaccgaccggacaatatcactctgcaaccggccaacaaaagccagaaaaaactgtacgacaaacctgacggtaaactgacgtttgatattttgtcatccgtctatctcagtaacacctggcatgatgacgaccagccagtacatttgaaaatcagtgatcagaatatccctatatccattaatctggatatttatggtggccccgaagaacgatattgccctgccggagtatatgaatttttacaggatagtgaaacacaaaatatgcgtctgcaaataaattcacagaactgtattcactgtaaagtttgtgacattaaagatcctaaacaaaatataacctggactacgcctgaaggtggcaacggaccaaattatacagggatgtaacgctatcactcagtctgagctgtgagcatagtaaccagtttttgtgtgaagccgggtaatttgtcaaagcttctggcgcagatttgtaattttcttaatgaccaaaattcatcaagatcaataatcgaaaattcatgcaactgacgcaaacgggatgcagcagagtgaggcattataccaatgcccacttttgcttcaaccatacggcaaaatgtttcaaagttgccgacctgtattctaattttcagtttagatggtactagttctgccttttttcggataaattcaaacattcctgtcccttcaggcaggctgatttgttcatattgaattaattcatgaaaggtcacgctttttctgtcagcaaagggatggtctgtcgcggtgataagcactagcctatcagtacggaacggcagtatttcaagattatctgttgtaatattaccagcaacaattccgagatcagttttcccctcaataacagaacgtacaatttccggacttggatactccctgagatcaatattcacatcgttatatagtgtaaggaaatggcttaacaatggggggagatactctgcaatagcagttatactggaaaatattctgacatgtcctttgatgcctttaacatgctcctgcatatcgctacgtaacatttccatctgattcacaataaggctggcgtggtgtttaaatgtttcaccagcagaggataacgttatccccttgctactacgatacagcaatctcagattgatactctgttcaagattacgtatacgcacgctaccagatgcggcagacatgtaagttttttccgctccacgtgttatgctcccttcttcactgatagcaaggaataattttaaatcttttatatcaaagtgcatcgttgtggctcataattaacgtataatacagtgtgctgcttttttatagactcagtcagactgagtatttcggcctatccgaattcctgtcacgtcgagataactacaaaatgtaggctgacggtgtcaccgccctaccatgatccggggcggatctggtaggacgctggtgaccgctgacagggggtcaggtcagacatattgtcggaaccgttgtaacgtagatgctaatacctgctccccgtggtcatcaggttaacccgtttacagcggttttttcagccccggcagatttatcataaactgatcaccgtaaatatgtggaatcagccaagtaaagaacagattggcaaacgccaccacaaacaatgatacgcctccataggtcaataaagcgcatacaagaataatcatcggcatggctttgttctggcccaccatacaggtcacagcactgacaattgagtagtaaaaaccagcaagttcaatcagcttgccaaatactgcacccagcagaaagacaggaaaataaagttttacaaaaccgatcaacttatccataaatatatcactgaaaaccggggcgaccgtcactggacgggtgaacagaactgcgccaagtgctaccagcggagcaaaaaggatcacactgtaaccacgataagcgaccagcatcagtaatgaatacattcattgtcttatctcgctagcatgactacccattttatccatgttatgcaacagcttgtgtcatatttttctgatctccattttagatcagacaggctattactcagggattccggcgcgaagaatggaacatactctaaaaagtactcggcggattcaagtcggtatcactccgttaataatctttattctcgacccgctgcatgttgattttacggttaaacgccgttctcttattcatcgcaggagtaaaccatcatgacacgcagtgaaatccccagaaaacgatcatgtattcaatcgttgattatcgtttcgaataccgacttttatcgcaggatttatgatggctaaagtcgatgtgaaatgcccgttttgcgcgcaaacggcatccgttaaaaagtatggtccggggagtgcagggcaccagcatccgctgtcaggtatgttgccgcagctttcaggtcgactatgaataccgcgcctgtcagcccggcatgaaagagcaggttgttgatcttgccatgtacactgccggtattcgtaatccgcaggggctggccatcaatccctggagcggcgcgctatggctgcatgaacacggtccgcgcggcggcgatgaaattaacatcccggaaaaaggcaaaaattatggctggccgctggccacatggggcgtcaactatagtggtctgaaagtgccggaagccaaaggtgaaattgtcgagggaacggcgcaaccggtttactactggaaggattctccagcgatcagcgggatggctttttatgccagcgacgtttttgcgccgtggcggcacaaactgtttatcggcgcgctaaaagataaagaggtcattgtgatgcgcgtcgatggcaatacggtgacggaagaaggccgtattctgggtgacagaaagcaacgtatctacgatgtgcgtgtcggacctgacggctacttatatgtgttaaccgatgagtccgacgggcagttactcaaggtaagtcctgcagccacgcgttaggtcaccgggatcatcaccactttgcgaaaagcagggcgctcggtaagctgctgataccagcgttccagattcgggcgcggcgtccatttcagacccacgttcagcaggttatagacgaaaggcgcaatagcgatatcaccggtgccaaagttatcccctgagaaccacggctggtgggccagcgcatcatcaagaagcgcaaacaggctatcacacttttcgataccggcttcaattgccgcctggtcgcgtttttccggcggggttctgaccagtcccatcaggatcacgcggtgcgccgggcttaacgtttgattcgcccagtccatccatttttcgccctccgcacgccgcgccggattatcaacccatagccggttctggccgtattgcgccgccagatagcggacaatggcattggattcccacaataacaggtcggtttcatcatctttaagcagcggcaccagcccattaggattcatcgccagatagtcggcatcctggttaacgccgaattttccgcctgccagaatttgatcgtatggcagttccagctcttcaagcgtccacaacacttttttaacattagtcgagttgttccggccccacagcgtaatcatattaaccccttccgttttatcaggatgatgacagtaatcggcctaccgtgagataaacctaacatttacacaatggtctgtaaaaaaatcgttatgaaggaagcgtaacgggatgttattgcataaactttaaaaactttaccaagttacggtttctttaacgtcgtgagtgcgttattactcaccgcacttattacacggtggtgtgacgtgtgtttttggaatggatactcgggtggtactatgacgcaatacgcttcttcccttcgtagcctcgcggcaggttcggttctcttattccttttcgcttcgcctgtaaaggcagaggaacaaacgatcgcgccgccgggcgttgatgcgcgagcctggatcttaatggattacgccagcggtaaagtactggcggaaggcaacgccgatgagaaactcgaccctgccagtttgacaaaaattatgaccagctacgtggtgggccaggcgctgaaggcagggaaaatcaagctgaccgatatggtgacggtgggcaaagatgcctgggcgacggggaacccggcgctacgtgggtcgtcggtgatgtttctgaagccaggcgatcaggtgtcggttgcggatcttaataaaggcatcatcattcagtcaggtaacgatgcctgtatcgcgcttgccgactacgtcgccggaagccaggagtcctttatcggcctgatgaacgcctatgcgaaacgactggggttaaccaatacaaccttccagacggtacacggtcttgatgcgccagggcagttcagtaccgctcgcgatatggcgttgctcggcaaggccttgattcacgatgtgcctgacgaatacgccattcataaagaaaaagaatttacttttaataatattcgtcagccaaaccgcaaccgcctgttgtggagcaccaatctgcatgtcgacggcatgaaaacggggacaacggctggcgctgggtataaccttgtcgcctccgccacccagggcgatatgcgcctgatctctgtcgtgctgggggcgaaaacggaccgtattcgttttaatgagtcagaaaaactgctgacctggggtttccgcttctttgaaacggtcacgccgattaaacctgacgcgacattcgtgacgcagcgggtctggtttggcgataagcatgaggtcaatttgggggcgggcgatgcggggtctgtgacgattccgcgtgggcagcttaaaaacctgaaggccagctttacgttgaacgaaccacagctcacggcgccgttgaagaaagggcaggttgtcggcaccatcgatttccagcttaacggaaaatccattgagcaacgcccgttaatggtgatggaaaacgtcgaggaggggggatttttcagccggatgtgggattttgtgctgatgaaactccatcagtggtttggcagttggttctcgtaaaataactccgtagccgggtgcgcgtcgcatccggctacgggcggttaatacatcagagtaatttgttgcgctttagcgtaggccacaaaggcctcatcgggacggcggtcgctgataatcgtatcaaagcgtgataattcccccatccgcgccggacgtaccttgccgaatttactgtgatccaccaccagtacatggcactgtgccattgtcattgcccaatgttttaccggcagctcttccagattaaagcaggtagcgcctttactggtatgaacgccagcggcggaataaaacgcgatatccggacaaatattgtttaacgtttcatggaaatcaagcggtttgaaaatggcgttgctggcgtgaaactccccgccgctgaggatggcgcggcaatggggtttgtcctgcagcgccaggaaggtattaagtgaatagcacaccgccgtaaagggaaggtcattatcaatggcttcaatgatccacggcgtggtggtgccgcagtcaataaataccgtctgatgcgcttgtaccaggcccgcagccagctgagcggctcggcgtttttcttccaccagacgagatttttgatcgcttaacagataatgactggcgctgcggggctccagtacgatatagccgcctagcaacacgacaggcgcgcttttatggttcaggtcgcgacgaatggtcatttcagagacgcccaacagggtcgcggcttctttaagatgaagtttatcgctgcgttttaaggcctgcagcaattgaccaatacgctcgtcgcgtcgcgtttccatagttcccctggagagttaaataagcgctccgcaccatacagagcgcttaatattactctttttttcgctatttagtcacgtacccagccttttcgaatgggcaatgcgaaacagaaacggtaacaacgttgcagcgcctggtagagcggcgcgccgtaccactgccagatcagctgtgcgctcaggcagccaagcatcgctaccagcagcgcgccaatcatatctaacggccagtgtacgccgagatagacgcgcgaccaggcgatggtaatggctatcgccatcatcacgatgcctgaccagaggcggtgccagaacaaaaacgccagcgcaaaggtaaaaatcaccgtaccgtgatcgctggggaacgagtcatcggcggcatgatgcaggaagttatagccgatatgatcgacaaacggacggtcgtgcgggaaaaggtgtcccattgtccaggagaccgccagactgataatcagcgcgatgccgattttaacgatcagctggcgctgggcgcagacccgatcgcggggcccccacagccagagtaccacggctaagagcgggacgatgttgatgacatctttggcgataaagatagcgagcgaaattatccactgcgcggaatcaggcgtggcgttaataaaataaaacagcgagttgttaaggttttccagcataacatccaggctcggagcaatgaaatcaaaagggatagccagctcatccccgtgcaaactgagcataaatgcagcgtaacagggaggaaaagcagtattgtcttatttggcggcaacatgaagagatttaagacaatggcataaaataacgttgatgataacggcgcaaacttaaattaaccttaaagtacgcaagcgctaagcggctttctgtaaaaatgtgcgctatttcccttgcagcctcataattcgctatctcagttccccgactttcattacactctgcgcggtttttattggcgaagagatggtatgcagaatcgtttacaatcaggcggcaggctgggacgtcaggcgctgctttttcctctctgtctggtgctgtacgagttttctacttatattggcaacgacatgatccagccgggtatgctggcggtggttgagcagtatcaggcgggcctggactgggttccgacgtccatgaccgcttatctggcgggcggtatgttcttacagtggctgcttggcccgttgtctgaccggattggccgtcgtcccgtgatgctggcgggcgtcgtgtggtttattgtcacctgcctggcgacgttactggcgaaaaacatcgaacaatttaccttcctgcgttttttgcaagggattagcctgtgttttatcggcgctgtagggtatgccgcgattcaggagtcctttgaggaggcggtgtgtataaaaattaccgcgctgatggcgaacgtggcgttaatcgcgccgctactgggaccactggttggggcggcatgggtgcatgttctgccgtgggaggggatgtttattttatttgccgcactggccgctatcgcctttttcgggctacagcgcgcaatgccggagaccgccacgcggcggggcgaaacgctgtcatttaaggcgctgggccgggattatcggttggtgataaaaaaccggcggttcgtcgcaggggcgttagcgctgggatttgtcagcctgccgttgttggcctggattgcgcagtcgccgattatcatcattagcggcgaacagctcagcagctatgaatatggtctgctgcagatgcccgtttttggcgcgctcattgccggtaatctggtgttggcgcgtttaacctcccgacgtacggttcgctcgctgatcgtgatgggcggctggcctatcgtcgcggggctgatcatcgccgcggcggcgacggtggtttcatcccatgcttatttatggatgacggcgggattaagcgtatacgcttttggcattgggctggcgaatgccggactggtgcgtctgacgctcttttccagcgatatgagtaaaggaacggtctcggcggcgatgggaatgctacaaatgctgatttttaccgttggcattgaagtcagtaaacacgcctggttaagcggcggcaatgggctatttagcctgtttaatctggcaaacggtattctttggctactgctgatgctggtcttcttaaaagataagcggacggggaatttgcaaacagtctgagagagcggctacgcctgataagctttctgttatcaggcatagagaggcatccgctagacgttgaacggcggctcgttgtttaatacgctgtcgataatatccagcacgccttcctggttgttcgatccggcgcggtatttcgccgccgccgcgactgcttcgctggcgtgcgacatggcaaaactaaacccggcctgacgcagcatctcaatatcgttgccgccgtcgccgaataccaccacttcactatcatgaatgccccagcgctgctgtaacagacgcaggccgttggctttatgcacgccgggaataattaaatcaatactgccatagccggtatgaacgggaaccatgatatcgccaatggcgtcgtgcagcgccgcctgtacttccggtatccgttcatcggtaatattaaggccgaatttgaaaaagacatcgttgatattattaaaattatccacaaactccagacgatgataatacattgccgcaacggcttttaacgcatcgtcgtagcgtttcagcgtgtaggcgctgttttttccacaggcgatgatctccacatcggcgcgtgtgagcaggtgttcgacaaccgcctggaagtcggcttttgtcagctcgccgttaaaaatatcctcgccttcgctgaccacccagccgccgttttccgcgacaaaagcgatttcgtgcgcaatttccggaaagaacgagattaactggtaatactggttgccgctggccacgacaaagcgaatgccttgccgcttcatttgttggtactgcgccataaaccggtcacggttataggttttttgatcgctcagaaaagtgccgtccatgtcgacggcgattaatttgatactcatgcgttatgctccatcaccggttgcggagtcgatacaggtttggcgacggccttcgccaccagcgccgccagaataaccagcgccagcacaaccatcatggcgctgcgtaatccataatgctctcccagatagcccaacagcggcggcccgaccaaaaacgccagatagccggtcgtggcgacaacgctcacgcgcgtcggcgcgtcgggaccggtatcgctggcggcgaaaatggtcagcgggaagccgagcgaagcgcctaagccccaaagaatgaccgagacgccggcgacccagtcgctatcgacaaaaataatcaggccaatgcccagcgctcccatcaacgcgctggcgcgaacaaccgtcacccggctatagcggtcaataaaccagccgccggtaaagcggccaacggtcataccaagcgtgaaaccggcgtagatcagagagccggaggttgggctaaaaccgtgtccgtctaccatcagtagcggtagccagtcattcgcagatccttcggcgaatgccattgccagcaccaccacgccaataagcaaaagctggatgtcccgataaaaaggtaatcctttttcctgaaggtgagaatcttccgatgcgtttttacccgtaccgtcagggatcgcccgaatggcgatgaaaatgggcgcgatcgccacggcagccgcgaggatgatatggatgttagccgggacgcttaatgcggttaacgccatgccgacaccagcgcccgccagcgtgccgaaactgtagaaaccatgcatcatcggcagaacggttttattcagctcgcgttcgaccgccgcgccttcgacattaatcgccacttcggcggcgccaaaactggcgccgaaaacggctaatccaagggcaaaaatcagcggcgaggcgcaccacagcgcgacgctaagaataaccatcccggttactgcacaggtcatcgtcgtgcgaataaccttccgggtgccaaatcgtttcaccagccaggcggaacaaagaataccgctcattgaaccgatagaaagcccgaataagaccgcccccatttccgcggtagagacggaaagaatatcccgaatagcaggcgttcgggttgcccaggaggccatcagcagtccgggtaaaaagaagaacataaacagcgcccaggtacggcgttttaaggcgttacgtgaggagaggacggtcatagcgtcaggccagaaaatagaagcgagaggtaaacattagcaagcttgtgtacatttgtacatatcatcgtcatacttcattgtgcagacagtttttactgtctgttttttcagcgtaagcggcaggctactatcgcctgcatcctgaatgagatgtggaactcatcatgaaagaaaatgccgtaagacgcgccaatgatcctaagcgacgggaaaaaataattcaggccacactggaagcggtaaagacctatggcgttcatgccgtgacgcaccggaaaatcgccgctatcgctcaggtgccgcttggctcgatgacctactattttgccggtatggatgcgttattgagtgaagcttttacacttttcaccgagaacatgtcgcgtcaataccaggacttttttgcgcaggtgacggatgcggagggggcgtgccaggcgataacggaaatgatttacggctcgcaggttacgacgccggataatatggcgttaatgtatcagttatatgcctatgccagcgataagccggcgttaaaaatagtcatgcaaaactggatgcagcgtagccagaatacgctggcgcagtggtttgacgcacagaccgcccgagcgctggatgcgtttatcgaggggatgacgctgcattttgtaacggatcgaacgccgctggcgcgtgaagcgattttacagatggtaaagcgaatcgccggagtgtcaatgtcgtgtcactctgcgttgggcaacaaaaaacccaccaaccttgaaccgaaatggcggggttgatgggctccacaaaatggggacatcaaagaaaagcagtggcaataggtatgactgatgctttaacgaaaagttcgacctattggcaaaattttttcacttaaaggcaaacttcagttttatcctaaccccggccagatgatgacaataagcgtccccgccagcgttagcagaacgttggcgatggcgtaagtccccgcataacccagcgctggaatattactgcgcgccgtatcgctaatgatttccatcgccggggcgcaggtacgcgcgcccatcatggcaccgaacagcagcgcccggttcatgcgcagcacataagcgccaaacaagaagcagatcaccaccggtaccaggctgacgacaagcccggcgatcagcatttgtccgccgaccgcgcccagaccgttgctgataccgctgccggcgcttaaaccaacgcctgccataaacaccatcaagccgaattctttcaccatattaagcgcgccctgcggaatataaccaaaggtaggatggttagcgcgcaggaaaccgagcatgatcccggcgaacagcaatccggccgcgttgccgataccgaaactaaaattgctgaactggaaggtaatcatcccgatcattaacccgatgataaaaaaagcgcagaaggcaagcaggtccgtcacctgactatgaatcgaaataaaaccaatgcgatcggcgatggtttttacgcgtctggcgtcgccgctcacctgtaacacgtcgcctttattcagcacgacgttatcgtcgataggcatttcgatctggctgcggatgacgcggttaaggaagcagccatgatcggtcagcttgagctgagcgaggcggcgaccgaccgcattgtggtttttcaccacaatttcttccgtcacgatgcgcatatcaagcagatcgcgatcaaatacttccttaccattacggaagctgggatcgagcctggcgtgcgcgtccggatagccgaccagcgcaatctcatcgcccatttgcagcaccgcatcgccatccgggttcgccagaataccgttacggcgaatacgttcgatatagcagcctgtctggcggtaaatacccagctcgcgcaggtttttaccgtcagtccaggccaccagttccgggccaacccgataggcgcggataaccggcaaataaaccttgcgattagcatcggtatccagaccgcgctcgcgagcaatttgctgggcgctggtttgcaaatcctgatgctgtagtttaggcaagtagcgcgcgcccacgatcagactgaccaacccaatcagataggtcagggcatagcccaggctcagattatcaagagcggaggagagttgggtgctggcgatgccggaatgtcgcagggtatcgcctgcgccaaccagcacgggcgtggaggtcattgagccggccagcataccggccgtcaggccgatatcccagccgaatagcttaccaaggcctaaggcgattagcagagcgctaccgaccatgaccagggcaagcatcagataatttttaccgtcgcgaaaaaaaatcgaaaaaaagttggggccagcctcgacgccgacacaaaaaataaacagcataaatcccagatttagcgcgtcggtgttaatactgaagtgttgctgccctaataatagagagaccactaaaacgccaatggaattaccaagttggactgaacccagacgtaacttgccaagacacaggccaagagccaggaccacaaataataacaggatgtaattcccatttaacaaatctgcgacgtttatattcacggagactaacttcttgtttacgagtaagctgttgaaagaaatggtaatttacgctactgtttttatcatgaattaagggtgcaatcgtattgcatacagcatccaaataaaaacaacacaacaatatatcctgctagtttaatcttattgcgtactaacggctataagaatcgtgcaggtgtgtttttggcatggaatgccacatgactttatctgactggatgcctcacggcggaaagcgtgttcgatagagagtgtcaggaggaacgattgaaacataaacacgggtgggcaagcgttgtctgctgctttgtactctttattgtggtgtgtctttcattaactatgcatgtacaaggcgcttttcgcgcggcagggcatcctgagattggactgttattttttacgttgcctggtgcggtggccagcttttgttctcaccggcgcgaggtgatccgaccgctgatcggggcgatgctggcggcgccgttttgcctggtgttaatgcgcgtggtatttatgcctacccgatcgttttggcaagaactcgcgtggttatttagcgccgtattctggtgtgcgttaggcgcgctctgttatttgtttattagcagcctgtttagccaccggcgaaaaaaacgccgatagcgccctccgtcagagggcgttgccagagcaatcaggcgaaaagattcagattttcttttgcccatgcttcaaaatccgtacagccgccgatatgtttttgatcgacaaaaatctgcggtacggtttctacaggtttacctacggttttttccaaatccgctttagtaatgccttcagcatggatatcaatatagcggtagttgaaatcgtcgcgttctttgctcagtttttccgccaactcttttgcacgcacgcaataagggcaccctggacggccaaaaataacagtaaacatatctctcctcgaacataaagccagacggcgaacaggtgttatcatgccgcgatttacggcagatgaaaagcaggttacgcctgttcctttgataacccagggctatatctgttaagcacgccggaccagaacgttctacactgtgcgtcagttaaccgggaggcttgatatgcgcacgattggcgtgttacccaaaagcgtactgatactggaatacctcggtatgattttgctggcgcttgctctgctatcgcttaatcattaccttacgctgcccgcgccgttcaatacgccgctggctggcgtattgatggttttcctcggcgtcgtgttgatcctccccgccgcggtggcgatgatgtggcgtattgcgcagttactggcgccgcagttgatgaaacgtccacccgacatttcttcccgttcagatagagaaaagcataatgagtccgaccattgaacttctttgtggccatcgttctattcgccatttcaccgatgaacccgtgactgacgcgcagcgagaggccattattgccgccgcgcgcagcacgtccagttccagttttttacagtgcagctctattatccgtattaccgatcgggcgctgcgtgaggcgttagtgcccctgacgggcgggcaaaagcatgtggcgcaggccgctgagttctgggtattttgcgccgattttaatcgtcatttgcagatctgtcctgacgcgcagctggggcttgccgaacaactgttgctcggtgtcgtcgatacggcgatgatggggcaaaacgcgctgacggcggcggaatcactggggttaggcggcgtgtatatcggcggcatccgtaacaatattgagtctgttaccgaactattaaaattgccgaagcatgtattgccgctctttggcctgtgtttgggatggcctgcggataatccggatctgaaaccgcgcctgcctgccgagcttgtggttcatgagaaccagtatcaaccgcttgatgaaaagctgctggcgcgctatgacgagcagttggctgagtattatctgacccgcggcagtaatacgcgacgcgatacctggagcgatcatatccgtcgcaccctgattaaagaaaatcgcccatttatccttgaatatttgcataaacagggctgggcgacgcgctaaaacctgcgggccagtgtatgatacgcgggcttttcagggttttcagcgaggtgcagggtgaaaattgccatattgtccagggatggaacgctctattcttgcaaacgtctgcgcgaagcggcgatgcggcgcggccatctggtcgagatactcgatcctctttcctgctatatgaatattaatccggcagcgtcgtcgatccattacaaggggcgtcgtctgccccattttgacgccgttattccccgtattggttcggccattaccttttatggtaccgctgcgctacgtcagtttgagctattgggtagctatccgctgaatgaatccgtcgccattacccgcgcgcgcgataagctgcgatcgctacaacttctggcgcgccaggggatcgatcttcccattaccgggatcgcccattcgccggatgataccagcgatcttattaagatggttggcggggcgccgctggtcgtgaagctggtagaaggcacgcaagggatcggcgtggtattggcggagacgcgtcaggctgctgaaagcgttattgatgcgtttcgggggctcaatgcccatatcctggttcaggaatacattgccgaagctaaaggatgcgatattcgttgtctggtcgtcggcaatgaggttgtggcggcgattgagcggtgcgcgaaagccggtgattttcgctccaatcttcatcgtggcggggtggccagcatcgcgacgatcacgccccgtgaacgggatatcgccatcaaagccgcacagacgctggggctggatgtggcgggtgtcgatattttacgcgccgcgcgcgggccgctggtgatggaggtgaatgcctcgccgggactggaaggtatcgaaaagactacgggcgtggatatcgcggggcgaatgattcagtggatagaacgtcacgctacgcctgaattttgccttaaaatcggcggctaatcgcaatcgtggattccgccgtagtacgaagcacgctttttgcgtaagctgtgccggtaattttttcatcgtcatcgtaagaggtagcactttattatgatatcactggtcgttcccactctggatacgttgcgtcaatggctcgacgacctgggcatgaatttcttcgaatgtgatacctgccaggcgctgcatttgccgcatatgcagaattttgacggcgtctacgatgctaaaatcgatttggtggacaacaccgttcttttttccgcgatggcggaggtcaggccttccgcgttgctgccgctggcggccgatctctctgctattaacgccagttcgttgacggtaaaagcctttctcgatatgcaggatgataatctgccaaaactggttgtgtgccagtctttatccgttatgcaaggcgtcacctacgaacagttcgaatggtttgttcgccaaagtgaagagcagatttctatggtgatccttgaggccggggcgcatcagcttctgtttaacgcggaagaagacgcgcaaaaaaccagcgcagttgaccattttcttcactaatcccttccgataatcaggcagtcgctgccagcgcggctgctgtttacacttttttatgctgctattaacctttatttaaagaattattcacctcctttctgaccatttcgctttatcacatagacaaaacctgcataaaaaattgataaaaggcgttttttaatctgggctatagcctcaaaccttagctaaagttattcttgcgaagcttctatagcgagcttgatggcagggagggcgacctctcttcttcatttgtatcaaatgaaaaggtatgcacatttcaggcatgttttaaaccacgcctaatgggttcatttgttaacggatttcagaaggaaagcgatgatgaccgccttaaagaaaaaatggctatcgggtctggttgcgggtgctctgatggtcgtctctgtcggcacgctcgctgccgaacaaaaaacgctgcacatttataactggtcagattatatcgcgccggacacggtggcgaactttgaaaaagagaccgggattaacgttatctatgatgtctttgactctaacgaagtgctggaaggcaagttaatggcaggcagcaccgggttcgatctggtggtgccatcggccagttttcttgagcgccagctcaccgcgggcgtttttcagccgctggataaaagcaaacttcccggctggaaaaacctcgatcctgaactgctgaaactggtagcgaagcacgatcctgacaacaaatacgccatgccctatatgtgggccacgacgggcattggctataacgttgataaagtgaaagcggtgctgggggatgatgcgccagtgaatagctgggatttagtcctcaagccggaaaatctggagaagctaaaaagctgcggcgtctctttccttgatgcgcctgaagaaatttttgccactgtgctgaactatctgggtaaagatccgaatagcagcaaagcggatgactacaccggcccggcaaccgatctgttgttgaagctacggccaaacattcgctatttccactcctcgcaatacattaacgatctggctaatggcgatacctgtgtggccatcggctgggcgggcgatgtctggcaggccgctaaccgagcgaaagaggcgaaaaatggcgtcaatatctctttctcgatccccaaagagggggcaatggcgttttttgatgtgtttgccatgccggctgacgccaaaaataaagacgaggcctaccagttccttaattatctgctgcgccctgatgtgattgcccatatttccgatcacgttttctacgccaatgcgaataaagaggcgacggcgctggtcagccagcaggtgcgcgataacccgggaatttatccgccggcggatgtgcgggccaagttgtttaccctgaaagtgcaggagccgaagattgatcgcgtccgcacccgcgcatggacgaaggtgaaaagcggtaagtaatttattaacggtatggcctgataagcgtgcgctatcgggcattccaccgtttgtatcgtttgattgtgttatgccggagagcgccttgtgaatgatgtcccccaccgcccgcaggtgaaaacccgtaaagcgctgacgccgcttctggaaattcgcaacctgacgaagtcattcgacgggcaacatgctgtcgatgatgtcagtctgactatctataaaggcgagatttttgccctgctgggcgcgtcaggttgtggaaaatcgactctgctacggatgctggcaggttttgaaccgccgagcagcgggcaaattatgctcgacggcgtcgatctggcgcatgttccgccgtatcagcgtccgattaatatgatgtttcagtcctatgcgttgtttccgcatatgacggtagagcagaacatcgcttttggtctgaagcaggacaaactgccgaaggcggagattaccagccgcgtcaatgagatgctgggtctggtgcacatgcaggagtttgcgaaacgtaagccgcatcagctttccggcggtcagcgtcagcgcgtggccctggcgcgcagcctggcgaaacgtcctaagctgctcttgttggatgaaccgatgggcgcgctggataaaaaattacgcgaccggatgcagctggaagtggtggatatccttgagcgcgtcggcgtgacctgcgtcatggtgacgcacgatcaggaagaagccatgacgatggcggggcgcattgccatcatgaaccgtggaaaatttgtgcaaattggcgaaccggaggagatttacgagcatccgacgacccgctacagcgccgaatttatcggatcggtaaatgtttttgagggcttactgaaagcgcgtgaggaggacggtctggtcattgacgcgcccggtttggttcatccgttaaaagtcgatgcagatgcctctgtcgttgataatgtgccggtatatgtggcgctacgtccggaaaaaatcatgctgtgtgagtcgccgcctgccgatggctataatttcgccgtcggcgaagtggcgcatattgcgtatctcggcgatctgtctatttatcatgtgcggctaaaaagcgggcagatgatcagcgctcaactgcagaatgcgcaccgttaccggaaagggttaccgacctggggcgatgaagtgcgtttgtgctgggaagcggatagctgcgtggtcctgacggtataagggggaaacatgagcacacttgaacctccggcacgcatcagtaaacctggcggcgcggcgctatggttggcgcgaatgcaaatgaaacatgggcgtaagctggttattgctttgccttatatctggctcattctgctgtttttattgccgtttcttatcgtctttaagataagcctggcggaaatggcgcgggcgatcccgccgtataccgatctgctggaatgggctgacggtcagttgtcgattacgctcaatctcggtaattttttgcaactgaccgacgatccgctttatttcgaagcctatctgcaatcgttacaaattgccggtatttccacaatctgctgcctgctgctgggctacccgctggcgtgggcggtggcgcacagcaagccctccacgcgcaatatcctgctgttgttggtgattctgccctcgtggacgtcttttttaatacgcgtctatgcctggatgggcattttgaaaaacaacggtgcgctgaacaatgtgttgctgtggctaggggttatcgatcagccgctgacgatcctgcacactaacctggccgtctatatcggcattgtttatgcttatctgccgtttatggtactgcccatttataccgcattgacgcgcattgattattcgctggtggaagcgtcgctggatctcggcgcccgaccgctgaaaacattttttagcatcattgtcccgctcaccaaaggcggaatcatcgccggctcgatgctggtttttatcccggcggtgggtgagttcgtgatcccggaactgcttggcgggccggacagtatcatgattggtcgcgtcctgtggcaggagtttttcaataaccgcgactggccggttgcttctgcggtcgccattattatgttgctgctgctgatagtaccgatcatgtggttccataaacatcagcaaaaaagtgtgggggagcacggatgaataacttaccggtcgttcgctcgccctggcgcattctgattctggtgctggggtttacttttctctatgcgccgatgttaatgttggtgatttactcgtttaacagttcgaagctggtgacggtgtgggcgggatggtcgacgcgctggtatggcgagctctttcgggataccgccatgatgagcgcagtgggactaagcctgacaattgccgcctgtgcggcgacgatggcggtggtgctcggtaccattgctgcggtggtgatggtgcgatttggacggtttcgcggcgcaaacggctttgcgtttatgatcaccgcgccgctggtgatgccggatgtgattaccgggctgtcgctgctgctgctgtttgtcgcgctcggtcatgctatcggctggccctccgatcgcgggatgctgaccatctggttggcgcacgtcactttctgtactgcctacgtggcagtggtgatcgcttcgcgattacgcgaactggatcgttcgattgaagaggcggcgatggatcttggcgcggcgccgttaaaggtcttttttgtcattacgttaccgatgatcatgccagcggtgatctcgggctggctgttggcctttacgctttcccttgacgatctggtgattgccagcttcgtttccggtcccggcgccaccacgctaccgatgctggttttctccagcgtgcgcatgggcgtgaacccggaaatcaacgcgctggcgacgttaatcctcggcgtggtaggaatcgtcggatttattgcctggtacctgatggcgcgagcggaaaaacagcggattcgcgatatccagcgtgcaagacgcggctgaagccactaaaatcttccactatggcaatgcgttgccgcgcgggtcgcggcatcattttcagggaagacattcattgggatttataaagcaatcaacctcatcacatgcccgtttaaatgtgcctacgctggtgcaggttgcggctatggcgattattttgattcgcggtctcgatgtgctgatgattatgaataccctcggcatacgcgggatgggcgagtttattcatcgcagcgtgcagacgtggagcttaaccctggtctttctggccagcttagtgctggtctttgttgaaatttattgtgcgttttcgctggtgaaaggccgtagctgggcgcgctgggtgtacctggcgacacaaattattgtgagcggatatctgtgggcggcgtcgttaggctacgggtatcctgagttgtttagcatcgcgggagaatcgaagcgtgatatcctgcattccctggtcatgcaaaaactccccgatcttttaattctgtttctgctgtttattcccgctcccagccgtcggttcttccggctgcaataatgtgtataatcgtcgccccggataatatgaaggttttttggtatgcagtgcgcactctatgacgcgggtcgctgccgttcctgtcaatggattacgcagtcggttaacgaacaactttccgcaaaaacagccgatttacatcgtttgctcgccgggctgcctgttgaacagtggtgcgcgccgattggcggcccggaacagcatttccgcaacaaagcgaaaatggtcgtgagcggtagtgtagaaaaaccgctcttcgggatgctgtatcgcgacggtacgccggtcgatctttgcggctgcccgctgtatcccgcctcctttgaccccgtattcagcgcgctaaaaccttttattgcccgggccggactcacgccttataacgtggcgcgaaaacgtggcgaactgaaatacctgttgctgacggaaagtcagttcgatggcggcatgatgctacgcttcgtgttgcgttcagaaaccaaacttacgcaactgcgcgcggcgttaccgtggctgcgtgcgcaactgccgcagctcagagtgatcaccgcaaatatccagccggtacatatggcgattatggaaggggagacggaaatctacctgacggatcagcaggcgctggcggaacgttttaacgatgtgccgctgtggattcgtccgcaaagtttctttcagaccaaccctacggtcgccagccgattatatgcaacggcgcgcgattgggtagggcaactgccggtacgccatatgtgggatcttttttgcggagtgggcggattcggcctgcactgcgcgacgccgcagatgcaattaaccggtattgagatcgcgccggaggcgattgcctgcgcgaagcaatccgctgccgagctgggattgacccgccttcatttccaggcgttggactccacccaattcgccaccgcacaaggcgaaacgcccgatctggtgttggtaaatcctccccgccgcggcattggcaagccgttgtgcgattaccttgcacaaatggcgccgcgttttatcatttattcgagctgtaacgcgcagacgatggcgcaggatattcgtcatctgccgaactaccgtattcaacgtgttcagcttttcgatatgttcccgcataccgcgcattatgaggttttagcgttactgcgcaggtcaatataatctattcacaatatttatttttatcccttaactatttcataaaaataataaatacaatcaattgattatttaattcaattggttgtatttatatattaccctatttttgcaaatcaaatcacaaataatcactttaaatcttttaatgactacttttgattattacagtgcgtgtaaggcaaaattagacaaggtggtttatcgggtaactttcaatagcatcagcgaagcaatacgtaacgtcagtaaaggggtcaatcatgacaacgaataggcacgcttatggagggcgttcagacgatgtttgccaaatttatagatgttattcaaacgtttttaactgaaccggcaatattaattgggatattagtcggtgttggctatgcgctggataaaaagacgcctataaaaattatcaccggtatgatcagcgcgatggtcggtttgatgatggtgttatttggcggctttcaattttcagccacttttaaaccggttgcagaggcagtcagcaaagcttatggcgtgcatggatacttaatggattcatacgccatgaaagccgcgacgcaaatagcgctgggcgataatttcggctatgtaggatacgtttttgtactggcgttttttactaacctgttattagttttatttggccgttataccggcgcaaaaggtatatttcttaccggtaataccggggtctctcattcacaggcagtactgtggttaatcgtcttctggctggggttcggttgggtacaatccattgtaattgccggggtattgaccggggtcttttgggcgttttcaactacgcttattgttaaacccatcgccaaagtgaccaataacgccggttttaccattgcgcataaccagatgctgggactgtggtttttctcgaaattcgcgcataaattcggcgatccggaaaagcatgacgccgaaaacctgaaacttcccggttggttagccatttttaaccacaacgtgacggcaatcgccattgtgatgacactcttcgttggcggttttctattggcgacagggatcgataacgtacagttaatggcgaaaggcaaaccctggtatatctatatcatcaatctgggcctgcaattctctatgtatatggtcatcttgctgcagggcgtgcggatgatggttggtgaaattaacggttcgtttaaaggatggcaggatcgctttattcctaacgctataccggctgtggatgttgctgctttattacctttttcgcctaacgcggccacgctgggattcgtcttttgtactttcggcacgattttttccatgggcatcctgctgctcatccatagccctattatggtattgcctggttttgttccgctcttcttttccggcggtcccatcggcgtattagccaaccgaatggggggatatcgttccgttattatttgtactttcctgttagggattattcagactttcggtacggtatgggccattcctttaaccaggctggcaaaagaaggtgtgggctggacgggaatatttgactgggcgactctgtggcctgcaatttgtgaattactgaaatttattgcttcaacgttccatcttggtccttattccatttaattgattcggtttatataaaggattttattatgaaagattctgtaaatattttattcgtatgcggttatggtgtaggcagtagcgtaatgttacagactgttgttaaaaaagcgttagcaaaatatgacttctcttttgatatggagcatacggcagcgggagaggtcggtggatttaccgactgggcagatatttatgcgatttcgaaaaaattgcttgatgttgttagcctcgatcctaaacacggacaatatctcattcccattgaaaatatcatggatggcgaatcaataggtaaacagatttacgatgtggtagagaaaaattttccgcacctgctcaacaaatgagggtgagtcatgaaagcgattattctgctgtttgacagtctgaataaaaactatttgccgccctatggtgatttgctaacgaaagcgcctaactttcaacgcctggcggcacatgccgccacctttgacaatagttatgtcggcagtatgccctgtatgccagcccgtcgggaactgcacaccgggcgctataatttcctgcatcgtgagtggggcccgctggaaccctttgatgattccatgccggaattattgaaaaaagcggggatctacacccatcttatcagcgatcatctgcattactgggaagacggcggcggtaactaccataaccgctatagctcctgggacgtagtacgcggtcaggagggcgatcactggaaggcgagcgttggcgagccgcccattccggaagtactgcgcgttccacaaaaacaaaccggaggcggcgtttccgggctatggcgtcatgactgggcgaaccgcgaatacatccagcaggaagccgattttccccagacgaaagtttttgacgccgggtgcgattttatccataaaaatcatgccgaagataactggttattgcaggttgagacgttcgatccgcatgagccgttttataccaccgaggaatatttatcgctctatgacgatgagtggcaaggcccgcattatgactggccgcgcggcaaagtcagtgaaagcgaggaggcgatagcgcatattcgctgtcgttatcgggccctggtttccatgtgcgaccgcaatctgggacgtatccttgatctgatggatgaacacgatctctggcgcgatacgatgctgattgtcggtaccgatcacggcttcttgctgggggagcacggttggtgggctaaaaatcaaatgccctattataacgaggtggcgaataacccgctgtttatctgggacccgcgcagcgcggtatgcggagcgcgacggcagtcgctggtgcagatgattgactgggcgccaacgctactggattattttcagcaacctattcccgcagatatgcagggccaaccgctggcgaaaatcattgccagtgatgaacccgtcagggaaggcgcgctgtttggcgtgtttagcggacatgttaatgttaccgacggacgctatgtttatatgcgggccgcgcagccggggcgtgagcatgacattgcgaactacacgttaatgccgatcaagatgaatgcgcgttatgacgtggatgaactgggaaaattatctctggcgcctccgtttaactttactaaagggcttcaggtattacgtattccggccagggaaaaatataaaggtgtgaatagctttggtcatctcttgtttgatctcagagacgatccgcagcagcaacatcctattcatgatgaggccatcgaagcaaggatgatcaacttacttatccgtttgatgaaagaaaatgatgctccggcggagcagtatcgccgtctgggtctggatgttgtctaaaaacgtaacaatgttgtaagccgggtgcgcgttagcgtcacccggcaagtattagtccgaatcgcctgttgatgcaggcgtttgagactgatgacaaactgtagaatgctcaatggcgctgcgcttatcaggccaggatagtttccgatggcggcccgtgggctgaataaggtatttatactgccatttcgcaacacggtgggctaatcacatacgtcttactgcgggaaccactgatcgctgattttctgataagtgccgtccgctttaatggcggccagcgcattattcagtttttccagcaacgccttattgtccgggcgcaccgcgatgccaagtccggtaccgaagtattgcggatcggtcactttctctgttgccggacccagttgcggattcgttttcagccactcattgaccactgcggtatcgccaaagacaccgtcaatacggccatttttcaggtcgataatcgcattctggtagctgtcgtaggccacggttttgacctccggatgtttatcctggagatatttttgatgcgtggtgccattttccataccgatacgcttaccttttagatcggtaaaggttttataggtgtcttttttggcaatcaccagcgcggagttcgcataatagggattgctaaaggcgacctgcttactgcgctccggggtaatgtccattccggaaatgacggcatcatattttctgaatttcagcgccgggataagactatcgaaagcatgattggtaaaagtacattctgcctgcatttgcttgcataatgcggttgccagatcgatatcgaagcccacaattttattactcgcatccagggattcaaacgggggataggtggcggaaaccccgaaattgattttttcagcggcgatgctgccagtggcgaaagaggcgagtaatgcagccagaactaactttttcatgatgtcactcccgtaatcttatgattatgcgccgtgtctgcggcatagatttacaatgccatcaattgaatttgtatgcaataaaaatgattaaatattttaaaatggataaaaaaagacggacaggttaaccacttgtccgtcggatttattcaatattatgcatcgtaggtttgataagcgcagcgccatctgaccattgtcgaacggcggcgagaatgccttatcctgcctggttaattgcgccgctcaaacgccagagctttacgctcaatcaaacgcatcatcagcgtcaatagaccgttgacgaccaggtaaattacgcctgccgcgccaaataccaccacatcgtaggtacgaccatagagcaactgactgtaccccatgacttccatcaaggtgatggtataggccagcgaggtacttttgaagaccagtaccacctcattagaataggaggagagggcgcgtttaaacgcatagggcaacaaaatcgccagcgtatctttcttactcatccccagcgcgctacaggactgccactgaccttccggaatcgcgcgaatcgcgccataaaatagctgcgtggtgtaagcggcgctgtttagcgacaacgcgatcagtgcgcacagccacggttcagacagtagatgccagagtagtggatactcttgcagcgtcgggaattgaccgggtccgtagtagatcaggaaaatttgcaccaacaacggcgtaccggtaaacagcgtgatatagccgcgcaccagccacaccacgaacggtgtttttagcgtcaggatgatggtaaaaactaacgccagcaccaaagcgacggcaatagaagccacggtcagcgtcaggctggtgtgtagcccttttagcagttcaggtaaatactcaagcattagtccggcctccgctcaaaacgtgtcgcgcgcaggtctatgcgtttgagaatgtactgactgatcagcgtaatgaccaggtaaatagccgccgcaataatgtaccagttaaacggttcctgggtgcgtgtggcaatacttttggtctgcaacatcagatcgttaacgctgataaggctgaccagagccgtatcttttagcaacaccagccactgattacccagccctggcagggcgtgacgccacatctgcggcatcaccagacggaaaaaaatcgccgtctttgataatcccagtgcctgacccgactcccactgaccagacggaacggctttcagcgcgccacgtagcgtctgcgacgcataggccgcatacagcagggacaacgcaatcacgccgcacaggaacggactgacgtcaaagttctcaatctccatttgcaccgggatctgcgtaaagccgagatggagggtaaacccgtcagacagcgtaagcaggagttgcgaggagccgaaatagataaacagcaccaccagaatttccggcaggccgcgcaaaatagtgaccagcgcggagcctatccaggcaatcgggcgccattttacggactcccagacggcaaagaacatggctaacgcgaggccaatgatcagcgcacagacggcaaggccgacggtcatcccggcggcgcttgctaaaggaaaaaattcgttcatcaaagattacttctggaaccatttgttatagatggtctcgtaagtcccatctttcttcactttttccagcgcagtattgaatttctgctgcagctcggtgttgccctggcgtaccgcgatacccaggccggtgccgaaataatctttatcggtgactttatcgccgaccggcgccagcttaggattggctttcagccattcggtcacgaccgccgtgtcgccgaaaacagcgtcgatacggccattttgtagatccagcttcgcgttctgatagctgtcatacggtacggtggtgatttccggatacttatccatgatgaatttctggtgcgtcgtaccgttctgtacgccgactttcttgcctttcagttgatcaacgctggtgtatttgccctgctgacccacgaacagcgcggagttgtcgtaatatggcgtggtaaacagcacctgcttttcacgttccggcgtgatatccattcccgccattacagcgtcgaagcggcggaatttcaggctggggatcaggctgtcgaacgcctgattggtaaaggtacaggaggcgtcgatctctttacatagcgcgttggccaggtcgacgtcaaagccgacaatcttgttattagcatccatcgattcgaacggcggataggacgcttcggtcgcaaaacgaatggtctgggctgctgtagcggaaaggctaaagcctgcaattagcgcggcaatcagaacttttttcattgtcattgtcccgaatcttagtgagagagatagtttttgaacgcttcggtctgagggtgggcaaagcaacccgcatcaccgtgctcgacgatgtgaccattttccatataaatcacacgactggcggtcttacgcgccacttcgacttcatgcgtaacgatcacctgagtaatgttcgtttccgccagctcatgaataatgctgacgatttgagcggtaatttccgggtccagcgcggcggtcggttcatcaaacagcagcacctgcggctccatcatcagcgcgcgggcaatcgcgacgcgctgctgctgaccgccggaaagatgcaacggataacgatcgctatagggcttcagacgtaaacgctccagcagcttttctgcgcgcgccagcgcctgatcttttgtcagacccagtacgcggcagggcgcttcaatcagattctgcacaacggtgagatgcggccaaagattatattgctgaaagaccattccgacattttgacgtagctcacgaatcgccttatcggacggcgttttcgtaaagtcaaaatggttcccggcgatagtcagagtgccggagcgcggcatctcaagcagattgagtacacgcagcagcgaacttttacccgccccgcttgggccaagcaacaccagcgtttcgccttcggggcaatccagcgtgatatcgaacagcgcctgatgcgcgccgtaaaagcaattaatgccgtttaattgaatactcattgacactcgtatacaggcagtctgatagctattgaagccgcagatagtacctttcgcagaatagttatgcaatatttatgcgttaaaagttaaatatatcccacattcttccctaaacatagcacaaaatagcaggaggaatagtaggtaagaagaattgtcggcatcccgggcagaatgccagacaatttacggggttatgggtgcaaaagcgggggaatactgtctgttaacggttttctatcgactggcgcagcgtaccggcaggggcatggacatctccgcccagatagcgaacgtcgtcaatcacccagcatgagccttcgtgaatcataagcacttcatcctgccagctttgatcgccctgttttaacgctacccgcagaggaatgttgcgcgcatctcggttcggaatggttgatgcgctggcgacgttggcgctatccggcagcgtagcgcggctggagaacagatcgccgctcatcaactggcggtgctccgtatcgcggctggcgtcggttaacaatttcgccaggttatcactcaagtaggggcgaagcgcggcgatatcattgctgtggtgttgaatacggtagtcgtaaaattgttgagccacgctgtccgggccgccttccacacacgcgccgatacgcgggccattatctttgtaggcgggagtgacggtcgtacaggcgctaagcagaagcgcgcacgggatgagcaaagagagtttagaatagcgcatgatgatttccttataggcgatcgagcaaaaaccgatctacgataatcaattatatcctttcaatgatagcgtatcagcttgataatgcgtttgagatcgtgtgcttagctaacccgggagattcactatgcagttttcaacaaccccaacgctggaaggacaaagcatcgtggagtattgcggtgtggtaacgggcgaagccattttaggcgccaatattttccgcgattttttcgccggcattcgggatatcgtcggcggacgttccggcgcgtatgagaaagagctgcgtaaagcgcgtgaaatcgcttttcaggaacttggcgagcaggctaaagcgttgggtgccgatgcggtggtaggcatcgatattgattacgaaactgtcggcaaggatggcagtatgctaatggtcagcgtcagcggaacggcggtgaaaacgcgccgatgaaagcgctactgtggctggtgggtctcgcgttgctgttaacaggctgcgcgagcgaaaaaggaattatcgataaagagggatatcagcttgatacccgacatcgggcgcaggcggcctatccgcgcattaaagtcctggtgattcactatacggcggaaaactttgacgtttcgctggcgacgttaacgggtcgcaacgtcagttcgcattacctgattcccgcaaccccgccattatatggcggtaaaccgcgcatctggcaactggtgccggaacaggatcaggcctggcatgcgggcgtcagtttctggcgaggcgccacgcgtctcaatgatacgtctattggcattgagctggaaaatcgtggttggcgaatgtccggcggggtgaaatctttcgcgccgtttgaatccgcgcaaattcaggcattgattccgttagcgaaggatattatcgcgcgctataacatcaaaccgcagaatgtggtggcccatgcggatatcgcgccgcagcgtaaagacgatcccggcccgcgcttcccgtggcgcgagctggcggcgcaggggattggcgcctggcctgacgcccagcgtgtggcgttttatctggctggacgcgcgccgtatacgccagtcgataccgcaacggtgcttgcgttactctcgcgctatggctatgaagtcaaagccgatatgacggcacgcgagcagcagcgggtgattatggcgttccagatgcacttccgtccggcgcaatggaacggtatcgcagatgccgaaacgcaggcgattgccgaagcattactggagaagtacggccaggattaacgcggtaaatttccgtgatcgcgcagccaggcggcggtgcgctcaatgccttcgtccagcgtgacgatgggctggtagcccagctcgtcctgcgcgcgagtcgtatcgagcgtaaaatcaaaattcagttttgacacgccgtaatgcgttagcgggggctctttggcggattttttgccgaagcgctccatactgcgggcgatcatatccagcatcgggtaaggcacagagcgaatgcggcagtcgatagtcagttcatcaattaacttttgtacgatgctgcgtaaggtacggttttcgccgttagtgatgttataagcgcggccagaaggcagatgatcgcagcccggctggctggccagccacatggcgtggatcgcattttcatagtaggtcatatcgaccagcgcgctgcccccgtgcggtaataagacgctaccgtaatggtgcatcatatgcgccagacgtgggataaatactttatcgtgcgggccaaacaggctttgcggacgtaacaccgtaaaacgtgtttgcggattggcctgcgccaacagattaatcacctcttcgccggcggctttactgcgggcgaactcattggcaaaccgatgcgggcggaaatcttctttgatatcacggtgatggtggtaatcaaaatagagcgagggagaggagatatgaataaaattgcgcacgccccaggcgaccgcccattctcccagacggcgggtggcgcgaacattcgctagatcgaaagcctgttgggttccccagggcgaggtaaagctggagcagtgccacaacgtgtcgatcccggcaagcatcactttagcctgcgaggagaccagttcggttaaatccgcatggacgaattccgcgcccattttttcaagcagcttgcccatcgcttcattgcgacccgtcgctctgacgctgatgcctttattgcgcaaaaattcaaccgcgtttcgacctaagccgctggtggcgccggtaaccagtaccttcatatcaatccactgtgtttaataaaccgtcgtgcgcattcttccgtgaattacgtcggtatgcaatgggaaacacgaaagaatacagcaactttttctcatttttctgtgatttgttctgcaagtcgggcaatacgccttgccattccccggaaaataaacaggtgcgccgggatcatcagtagccagtaaatcaggcccggcattccgtgtggatgccaccaggcgcgcacgtcaatttcgcggtagcggcctttatcgtgcagcgtgaagctaagccgccccagacccggcgctttcatgccaaacaagagcgtgagctgtttttctggttcgacaatgatcactttccagctatctaccgtatcgccaggcttgagcaaggtatgcgacgggcggcctttcgccagtttatgccccaccagacggtccatcgcggcgcgcgtctgccacaaaatattgccgaaaaaatagccctctttgccacccagccgatttacgacctgccatagcgccgataggctggccggggtctgcgcggtaaagcccgcctgctttggaaaatagccgtattcgggacgccagcgggcgaaggccagcgcgtcgtagccccagtcgctggagttcaccagtttttcttcttctttcagcgtgcggcgaacggcgtcatcaaaggtgataagcgtttgggggatcaacttttttaacgcggcgtcatcggccagcaaatcgtgccttaatccctggattaacgcttttgcggtagttggcggcacggaggtaatgacgtttaaaaaccagaccgaaatccagcgggtcggaaaaggcaccgggatcagcggacgccgtttaccgctgacggccataaaacgttcaaactgctgctgataacttaatacctgcggcccggcggcttccagaatacgatgctcgcgagcagggtggtccagtaagccgaccaggtagtagagtaaattttccagagcgatgggcgtggtgcgcgaacgcacccagcgcggcggcgtgagtattggcaggttgtaaaccatgtcgcgcatgacttcgaaggcggcggagcctgcgccgacgatgatcccggcgcgtaattccgtcaccggtacgcctgcgtcgcgcagcgtgtcagccgtaagctggcgggcgcgcaggtgatcggattgctcatgcgccggtgcctgcagtgaactgaggaaaataagttgtttaaccggcgtctggcgcagcgcgtcgcgcacgttgagcgccgcctgacgctcatgggcgataaaatcgccgccttcgcccatgccgtgtaccagatagtaaacggtatcaatgtcgcgaagcagcgcgggtaaattttccggccagtgcagatcgaccttatgacaactgacgttggcgaggcgctgtttttccagacgttcgatgcgtcgcgccgccgctcgcacctgatgcccttgctgacttagcgcaaagaccaggtgctggccgatatagccgctggcgccgagaaccagaatgcgttgcgccacgttgctctccttagcgggctaaaaaggcgcgccagtgggcgacgacgtcggtaagctgttcgcgagagacatccagatgcgtcaccagacgcacaatcggcgcggcgttaatcaggatattccgttcccgcaaatagtcgccaagcgcggcggcctgtgcttcgccaacgcgaacaaacagcatattcgtttcgtggcgtatgacctccgcgcccgcttcccgaagctgctgcgccagccaggcggcgttatcatgatcctcttgcagacgcgccacgttatgcttcagcgcatacagtccggccgctgccagaatcccggcctgacgcattccgccgccgaccattttacgccagcgcgtcgcgcgtttaatgtaatcgcggttgccgaccagcagtgaaccgaccggcgttccgagaccttttgacaggcagatggtaaaagagtcgcaatactgcgtaatctcttttaactcacagccgtaggcaaccaccgcgttaaaaattcgggcgccgtcaacgtgcagcgccagtccacgttcgcgggtaaatgtccaggcgtctttcagatacgcgcgcggcagcactttcccgttatgcgtattttccagactgagcaagcgcgtgcgcgcgaagtggatgtcatccgctttaatcttcgccgccacgttctccagcggcagcgtaccgtccgcggcggcgtcgatgggctgcggctgaatgctgccgagcaccgccgcgccgccagcttcatagagataattatgcgcgccctgaccgacgatatactcttcgccgcgttcacaatggctaagcagcgcgaccagattggcctgggtgccggtgggtaaaaaaagcgccgcttctttaccggaaaggtcggcggcgtagcgctgaagggcgttaacagtagggtcatcgccgtatacgtcgtccccgaccggggcggtcatcatcgcctcgagcatggcgcggcccggtcgggtaacggtatcactgcgtaaatcaatcatggcacatccctggattttaaaaggtgatgtgcactgttttaccttagccagttcgttttcgccagttcgatcacttcatcgccgcggccgctaataatggcgcgtagcatgtacaggctaaagcctttcgcttgttccagtttgatctgcggcgggatcgccagctcttcttttgccacgaccacgtcaaccagtaccgggccgtcaatggaaaacgcgcgctgtagcgcaccgtccacgtctgcggctttttccacgcgaataccggtaatgccgcaggcttcggcgatacgcgcgaaattggtgtcgtgcagttcggtaccgtcggtaaggtagccgccggctttcatttccatcgccacaaagcccagcacgctgttattaaagacgacgatttttatcggcagcttcatctgtaccaccgagagaaaatcgcccatcagcatactgaagccgccatcaccgcacatcgcgataacctgacgacccggcgcggtagcctgagcgccgagcgcctgcggcatagcgttggccattgacccgtggttaaacgagcctagcaggcggcgcttgccgttcatttttagatagcgggccgcccagacggtcggcgtgccgacatcgcaggtaaaaatagcgtcgtcagcggcgaaatgactaatttgttgcgccagatattgtgggtggatggctttatcgctgagtttggctaagtcatcaagtcccttacgggcgtcccgatagtgctccagagctttatcgaggaatttacgattgcttttttcttccaccagcggcagcagggcgcgaagcgtggctttaatatcgcccactagcgccatgtcgactttgctgtgcgcgccaatactgcccgggttgatgtcaatctgaatgattttggcatcgctcggataaaaggcgcgataggggaactgggtgccgagcaggatcagcgtatcggcgttcatcatggtgtggaagccagaagagaagccaatcaggccggtcattcccacatcataagggttatcgtactcaacgtgctctttgccgcgcagggcatgaacgattggcgcttttagttttgccgccaacgcgaccaactcctcatgcgcgcccgcgcagccgctaccgcacatcaatgcgatattgctggagtagcgcagcagttgcgccagttttttcagctcttcctccgccggcgtgacgacggggagcggggcatggtaccaatgggtgacggcgttttcaggcgcgggtttcagcgccacgtcacccggcagtacgaccacggagacgccgcgatttaacaccgctttgcgcatagcgatggcgagtacctgcgggatctgctccgggctggaaaccaactcgcaatagtggctgcattcacggaacaactcctgcgggtgggtctcctggaaataaccgctgccgatttcactggacggaatatgggcggcgatcgccagaacagggacgtggttacggtggcaatcaaacaggccattgatcaggtgcaggttgcccggtccacatgaaccggcgcacactgccagctcgccggtaagctgcgcttgtgcgccggcggcgaaagcggcgacctcttcgtggcgggttggcatccattcaatggttcccatacgattaagactatcgctcaggccgttcagggagtcgccagtgacgccccagatttgttttacgccagcctgttccagcgttttggcgataaaagcagcaacggtttgtttcatggttctccatctccttaaatgtgataacggttacaagtttagttgaagatgacgatgacgtttttctttggcggagagaggggcgaaaggatgaagcgagtggtaaatcgcccggtggcgctgacgcttaccgggcctacgatggaacgtttaccgattatgcgagaacaagatcgccctgcggatggcaggagcaggccagtacgtaaccttcggcaatctccgcctcgctcagcgtcatggtgctactcaccgtatagtcgccggaaacgactttggttttacagcagccgcaaacacctgcccgacaggcagcggcaaccggtactttattactctccagcgcctccaacagcgtcgtaccgatcggggcataaaattcctgcgctggctgtagcttggtgaatttcaggccgctggttgccgtttccgccaccggcgtgaagaacttctctttaaagaagcgcgttacgccaagcgctttcactccctgttcgacgaaatccatatagggcgccgggccgcaggtcatcacggtgcgcgatgccaaatccggtacgctctgtaacaattccgtggtcagacggcccgcgataaaaccttccgtggcatgattttccgccactagcgtgaccggatactgtcgccactcgtcggcaaaaatcacatcatccggcgaacggacgttaaagatgacctgcacgtcggcctgcgggcggtatttcgccagccagcgacgcatcgacatgattggcgttacgccacaaccggcggcgagcagcagaaacttatcttctgttttatcgtcacaggtaaaatcgcccattgcatcagacagccagatgtaatcgccgcgcttgatgtcatgggtcaaccactgcgaacccgtgccatcgtcaatccgacgaacggtcagcgtaatatattcactgacgcccggcgtagacgaaagggtgtaggcgcgcagcgtttccgctgaattgcgcacgctcaccagcgcatactgcccggcgcggtaagggtagtagtcatggcataatagcgcaattgtccatacatccggcgtctcctgacggatgtgatgcacctgcattcgccagggacactgtgaggttggcatcgtcatcattgacctccttacgcgctcagcaattgcttcatgtcttcttcaacggtggtcacggaacgcagaccgaacttctcgttgaggatagccagcagatccggcgtgaagaagcccggcgcggtcggcccggtgacaatatttttcacgcctaatgacagcagcgtcagcagaatcacgatcgctttctgctcaaaccaggagagcaccagcgatagcggcagatcgttgacgccgcagcccagtttttccgccagcgtcaccgccaggataattgcggagtaagcatcgttacactgaccggcatcgaccagacgcggcagcccttcgatgtcgccgaactccagtttgttgaaacggtatttaccgcacgccagggtcaggatcaggcagtcatccggcacgctggtggcgaaatcggtaaagtagttacgctcgccgcgcgcgccgtcacagccgccgactaggaagatgtgacgcagtttttcacggctgaccagatcgatgagcgtatcggcagcgccgagcagggtctgacggccaaaaccgacggtgatgatatgcggaatttcgctatacgggaagcccgccatttgctgcgcctgggcaatgaccggcccgaagtcatcgccttcaagatggctaacgcccggccagccgacgatgctacgggtccagatacggtcgtcatagctgcccacggtcgggtcgataatgcagttagaagtcatcacgattgggccagggaagcgggcgaattcgacctgctgattctgccagccgctgccgtagttaccgaccagatgcttgaatttacgcagttccggatagccgtgtgcgggcagcatttcaccgtgagtgtagacgttaacgccggtgccttcggtctgctccagcaggttgtagagatctttcagatcgtgaccggagatcagaatgcacttgccttcagtcgctttgacgttgacctgagtcggcgtagggtgaccgtatttggtggtttcaccggcgtccagaatgctcatcactttgaagttcatctggccgatttccattgcgcactccagcagcgcgttcatgtcagcaggccaggtgcccagccaggccatgattttgtggtactgcgcgtaaatgtcgttgtcgtattgaccgagaacgtgcgcgtgctccatatacgccgccgcgcctttcagaccgtacaggcacagcagacgcaggccgaggatgttctcgccaatggcggctttgtctttattcggggtaaattccgccgcctgacgttgcaggtcgcccagatcgtcgctgaccagttgcagatcggccatcggattgtcgcaatgcgcattggcatccacgctcaggcactgcgctttcaacgcttcacgcaaggcaatcgcttcacgggcgtagccgacgatacgcggagagtcgaagttaacgttggtcagcgtggagaaaaacgcgcgcggcgcaaagttatcaacgtcgtgattaatgatgccatattcacgggccttcaccgcccaggcagacaaaccttgcaaagccgcaatcagcagatcctgcagatcggacgtttcagctgttttaccgcacattccctgcgcgtaggagcagccgtttccggctggtgtacggatggtttgttcacattgcacacaaaacatggtcacaccttttaaagttatatttaatatacatgtttaaggttatgcctgtgaacaaagggataaaagggatttctgccataatgtgcagggagattgatttagcgcaattttggcggcagatgcctaccgccaaagaggtatcaggccgagaagaacgccattaagagggggaccagcaggctgaggataaagccatgtacgatagccgccggaacaatctctacgccgccggagcgctgtaataccggcaacgtaaagtccattgaagtcgctccgcacaggcccaacgccgttgaacggctgcggcgaaccagaccgggaataagcataatggctaagagctcgcgggccagatcgttaaaaaatgccgcgctgccgataaccggtccaaacgactccgtcagcaaaataccggaaagagagtaccagccgaaacctgacgccatcgccagggcggtttttagcggtaagtccaggataaacgcattaatcacgccgcccagtaatgagcttgccacgacaacgaccgcgaccatcattccccggcggttaagcacaatttgctttaaggtcatgccgctatttcgtagctgaatccccaccaggaacaataaaaagatcagcgtatattcactggcttcggtggcgtgctgtaaaacagagagtccgctcaggccgatgacaaaccccaataccactacgccgcacagttgcagcgactccagcgccatggcaatacgtgaaggcagtttttcctgctgatgatggtgacgccacgggaggatacgttccagccacaataaggcggcgatattacacaataaaataatcgtaatactgacggcggaataatgaaaaatcgccaccagattactggcgaggttatccaaaaacgccaggcttattcccataaaaaagagaataaggtacacgatccagctcagtagccggttaataagttgtaatgcggctttatgtcgcagtggaatgagatagcccacaatcagtggaaccagaatgattaaaagtcctgaaaacatgaacagccgggcccttttttattgtttgaatagcgtacatgacactaccgaattccagactatcagtaaagcgacaccgtcagccgtacatttatcagacatttgccccaggcaaagggggggaatatcacgccaggcggacgcatttgccgttatactgcggtgaattttatggagtgatgacgtttttctggaggaagcatgattctcgaacgcgttgaaatagtaggatttcgcggtatcaaccgactgtcgttgatgctggagcaaaacaacgtgctgattggggaaaacgcctggggcaaatccagcctgctggatgcgctgactctgttattgtcgccagaactcgatctctaccattttgtccgtgaggatttctggtttccgcctggcgacataaaaggacgcgagcatcacctgcatattattctgacttttcgcgaaacgcagccagggcggcatcgggtacgtcgttatagagcgctggaagcatgctggtcgctttgcgaggatgattttcaccgtattttttatcggctagagggcgaatgcggcgccgatggcagcgtgatgacgctgcgcagttttctcaatagcgatgggcagccattactggtggaaaatattaacgatcaggtgcgccacctggttcgtctgatgccagtgctacgtttgcgcgatgcgcgctttatgcgacgtattcgcaacggtacggtgcccaatgtgccggatgttgaagtcacggcccgacagctggattttctggcgcgtgagctggcgacccggccgcaaaatttaaccgacgggcagattcgtcagggactgtccgcgatggtgcaactgcttgaacactatttctcagagcagggcgcaggacaggcgcgtcaccgactcatgcgccggcgttcgcaaaatgagcagcgtagctggcgctatctggatattattaatcggatgatcgacaaaccgggcagccggtcgcatcgggtgatcctgctggggcttttctccacgctgttacaggcgaaagggacgctgcggttacataaagacgcacgaccattactgctggtggaagatccggaaacccgtttacatcccattatgctttcagtcgcctggcaattgctcaatctgttaccgctacagcggatagcgacaaccaactcaggcgaactgctttcgctaacgccggtggaacatgtcgtacggctggtgcgcgaatcttcccgcgtcgccgcctggcgtctgggcccgggcgggttaagcgcggaagatggacggcgcatcgcctttcatatccgctttaatcgcgcgtcgtcgctgtttgcgcgttgctggctactggtggaaggcgagacggaaacctgggttattaatgagctggcgcgtcagtgtggacatcattttgatgcggagggcattaaagtcattgagtttgctcagtctggcctgaaaccgctggtgaagttcgcccgccgtatgggaatcgagtggcatgtcctggtggatggcgacgaagcggggaaaaaatatgccgcgacggtccgcagtctgcttaataacgatcgggaagaagaacgcgaacatctcacggcgttgcctgcgctggatatggaacattttatgtatcgtcagggctttgccgatgtttttcaccgggttgcgcaacttccgcctaatgtgccgatgaatacccggaaaattatcactaaagctatccaccgctcgtcaaagccggatttggcgattgaagtcgcgatggaagccgggcggcgcggaattgacgccgtgccgccgctgttcagaaagatgttctcgcgcgtggtttggctggcgcggggccgggcggattagcgtttgaatgtggccggaacctgttcgacgacgctatcgagtaatgcatagcggcggcgatactcggcccgttttttactggcgatctccgcttcgctttttcgggcgatcgccagcggcagcgtatagtaattccctttaattctttcaccgcctaacgattcccaaaacgcgtcatagtcggcatgcatttgcgtctttttatccatgtatcgccagctacgataaacgtgcgcatcgttactcacggctataatcttttctgcctgaaagacttgcgcaaactgacagagagcctccatcacgatgcgtttgggaaaaagaccatggcaggctttggtcgcctgctggataatttcgtgagggacgtcgtttgccgcgccctgtaatccgccgataaatagtgtgcgttgttggttaaagcgacacagggtaaatgtgatctctgccagaatacgtaactgtgcgtcgcgaacaacaatagtgctttcaccttctttatccagtgagaccagactgactaaatcaagttgaaacaactcgccggttttagtttcaaatttagcaagattcaggccatactgacttaaatagctaacttgttgttcccgcgataaaagttggcgcatctgttgataatgaaaacacagcgcatctaaggcgaaatcgcgtttaatatttacagccatataaggacgatgtagccgaataggcaaacgcggctgacgagcaagtaacgtatttaactccggccattgggtgagattggtcagtaattggctggtcgcacgcggcatgactaatgagcggattaaaaacttgcgacgaaagctggctttacgccagaattttcctggctgtaattgcccgcgcgtcagacgaataaataattgtaaaggagagatgtaatctgaagtgtaccaggtattatctgtaagctgtgtcatgatcgtaatccgcgacataagattgtcgagattgaaccacaggaaacattaaccaatcgtcaatacagccggcgctatctttattgcgtcaggtttgtttagatacggtttactttctggttaaaattttgccgtcagggtttctatgcgtgctaagggaaagaaatttaaaaagcgttatctggtcattattttaattcttttagtgggggggatggctggctggcgaatgataaatgccccgctgccaacttatcagacattaatcgtgcggccaggcgatcttgaacagagtgtactggcgactggaaaactggacgcgttgcgtaaagtggatgtcggcgcgcaggtgagcggccagttgaaaacgctgctggtctccattggcgataacgttaaaaaagatcagctactcggcgtgattgacccagatcaggcggagaaccagataaaagaggtcgaggccaccctgatggagctgaacgcggagcgtcagcaggcagccgctgagttaaagctggcgcgggttacgctggcgcgccagcagcagttagctaagactcaggcggtatcgcaacaggatctggataccgcggcgacggagatggcggttaaacaggcgcgtattggcaccatagatgcccagatcaaacgtaatcgggcctcgttggacaccgcgaaaaccaacctggaatatacccgtattgtcgcccccatggcgggggaagtgacgcaaatcactaccctgcaaggacaaacggtgattgcagctcagcaggcgcccaatattctgacgctggcggatatgagcaccatgctggtaaaagcgcaggtctcggaagcggacgtgatccatcttcgggcggggcagaaagcatggttcaccattgcaggcgatccgcaaacgcgctatgaaggcgttttaaaagatattctgccgacgccggaaaagatcaacgacgctattttttattacgcccggtttgaagtgccgaatcccaaaagaatcttgcgtcttgatatgaccgcacaggtttatattcaactcatggatgtcaaaaatgtgctgattattcctctcgccgcgcttggcgaaccggtgggcggcaatcgttataaagtggcgctgttgcgtaacggcgaaaaacgtgagcgcgaagtggtcattggcgagcgtaacgatacagacgtggaagtggttaaaggtctggaagcgggcgatgaggtgatcatcggcgaaagcaggccaggagcgacgccatgacggcattgcttgaactgtgcaatgtgagtcgtagctacccctccggagaagagcaggtggcggtgttgaaagatatctccctgcaaatccacgccggggagatggtggcgatcgtcggcgtttccggttctggaaaatcaacgctgatgaatatcctcgggtgcctggataaaccgaccagcggcacttatcgggtggcggggcgggacgtctcgacgctggacccggacgcgctggcgcagctgcggcgtgagcattttggctttatctttcagcgctaccatctgttgtcgcatttaacggcagcgcaaaatgttgaaatccccgccgtctacgccggcattgaacgcaaaaaacgccaggcgcgcgccagagagttgcttttgcggctgggattaagcgatcgcgtcgattacccgccttcacagctttctggcggacagcagcagcgtgtcagtattgcccgcgctctgatgaacggcggacaggtgattctggcagatgagccgaccggcgcgctggatagccattccggcgaagaggtgatggcgattttgcgccaactgcgcgatcgcggacatacggtgatcattgtgacgcacgatccgctgattgccgcccaggcggagcggattattgaaattcacgatggcaagattgtccataatccgcccgcgcaggaaaagaaacgcgaacagggcgttgacgctgccgtagttaatacggctcccggctggcggcaatttgccagcagctttcgcgaagcgctgtcaatggcgtggttagcgatggccgctaacaaaatgcgtactttactgaccatgctgggaattattatcggtattgcgtcggtggtgtcgattgtggtggtcggcgacgccgcaaaacagatggtactggcggatatccgcgctatgggcactaacacgattgatattcatccaggcaaagattttggcgacgacaacccgcagtatcgacaggcgctgaaatatgacgatctggtggctattcagaaacagccgtgggttaactctgcgacgcccagcgtttcaaagagcttacgtcttcgctatggcaatattgatattgccgtaaatgctaatggcgtcagtggcgattattttaacgtttacggcatgtcctttagggaggggaacaccttcaatgctgtacagcaacaggatcgcgcgcaggtggtggtgctggatgccaacacgcgacgccagctatttccaaataaagcgaatgtcgtaggggaagtggtgctggcgggtaatatgccggttattgttattggcgtggcggaagagaaaccgtccatgtacggcaatagcaatctgttgcaagtttggttgccctatagcacgatgtcagatcgcataatgggtcagtcatggcttaactcgatcaccgttcgtgtgaaagatggcgttgatagcgatcaggctgaacagcagcttactcgcctgctcaccttacgccacggtaaaaaagacttcttcacctggaatatggacagcgtcctgaaaacggctgaaaaaaccacctatactcttcagttatttctgacgctggtggctgtcatttcgctggttgtcggcggcatcggcgttatgaatattatgctggtttccgtcaccgagcgaacgcgtgaaatcggcatccgtatggcggtaggcgcgcgcgccagcgatgtgctacagcagtttcttattgaagcggtgctggtttgcctggttggtggagcgctggggattagcttgtcgatgttcatcgcatttatgctacagcttttcctgcccggctgggagatcggtttttcactgactgcgctggcgagcgcgtttttatgttcgacgtttaccgggatactgtttggctggctaccggcgagaaacgcggcgcgactggacccggtggatgcgctggcaagggagtaatcttgctgacgtcatttgtcggcctgataagatgcaacagtgtcgccaccaggcactggcgttaaataaaaatgccagccgatcgggctggcattttgcctcctggatgtacacaatgagacagaggagctatgcaacggcctctgcttcgatgggcacgatgacgctggcgtgattgccttttggcccctggtggacatcaaaccggacagactgtccggctttaagcgttctgtaaccatccatttgaatggtggaataatgggcgaaaatatcctcgccgccgccttcagggcagatgaaaccaaaccctttggcattgttgaaccactttacagtacccgtttccatgcttcgacatccttcgtaaatcttatataagtaagatggaatgaaccggtgacggagtgggggctgttcaaaacctcaccaactctcgacattacaatttagagaaatcaggcgaggcgtcaagcatcaggcaggggggatcgggtaaaaatgaatcaaaaatttgaagcagttaacgctattgccgggaatgtgacagatgtcgcggatggtactgatagatgttagttatctatcaattgaggtagattgattgtgtgcatagactctggtcagcggcagattttcctgccgacaactgtaaccgataatgacgactgacaatgggtaagacgaacgattggctggattttgaccagttggtggaagatagcgtgcgcgacgcgctaaaaccgccatctatgtataaagtgatattagtcaatgatgactacactccgatggagtttgttattgacgtgttacaaaaattcttttcttatgatgtagaacgtgcaacgcaattgatgcttgcagttcactatcaaggcaaagccatctgcggcgtgtttaccgccgaggtggcggaaaccaaagtggcgatggtgaacaagtatgcaagggagaacgagcatccgttgctgtgtacgctggaaaaagcctgaatgcaggtataaaaattgggggaggtgcctatgctcaatcaagaactggaactcagtttaaacatggctttcgccagagcgcgcgagcaccgtcatgagtttatgaccgtcgagcatctgttgctggcgctgctcagcaacccatcggctcgcgaagcgctggaagcatgctccgtggatctggtggcgctccgtcaggaactcgaagccttcattgaacaaaccacacccgtactgcctgccagtgaagaagagcgtgatacgcagccgacgttaagtttccagcgtgtcctgcaacgtgccgtcttccacgttcagtcttccgggcgtagtgaagtgactggcgcgaatgtgctggtggctatctttagcgaacaggaatcacaggcggcttatctgctgcgcaagcatgaagtgagccgtctggatatcgtgaactttatttctcacgggacgcgaaaagacgaaccgagccaatcttccgatctcggcaatcagccaactggcgacgaacaagctggcggggaggaacgtatggaaaacttcacgacgaatcttaaccaacttgctcgcgtgggcggcatcgatccgctgattggtcgtgaaaaagaactggaacgcgcgatccaggtcttgtgtcgtcgccgtaaaaataacccgttgctggtaggggaatccggcgtcggcaaaacggcgattgccgaagggctggcctggcgtatcgtgcagggcgatgtgccggaagtgatggccgattgcaccatttactcgctggatatcggttcgctgctggcgggcaccaaataccgcggcgattttgaaaaacggtttaaggcgttgctgaaacagcttgagcaggataccaacagcatcctgtttatcgatgaaatccataccattatcggcgctggcgcggcgtcgggcggacaggtggatgcggcaaatctgattaaaccgctgctttccagcggtaagatccgggtgatcggctcaacgacctatcaggaattcagcaatatttttgagaaagaccgggcattagcgcgccgtttccagaaaattgatattaccgagccttcggtggaagagacggtgcaaattatcaacggcttgaaacctaagtacgaagcgcaccacgacgtgcgttataccgcgaaagcggtgcgtgcggcggtcgagctggcggtaaaatatatcaatgaccgccatctgccggataaagccattgacgtgattgacgaagcgggcgctcgggcgcgtctgatgccggtgagcaaacgtaagaaaacggtcaacgtggcggatattgagtccgtagtggcgcgaattgcgcgaattcctgaaaagagcgtctcgcagagcgatcgcgatacgctgaagaacctgggcgatcgtctgaaaatgctggtcttcggccaggataacgcgattgaggcgctgaccgaagctattaagatgagtcgtgcgggtctgggccatgagcataaacctgtcggctcattcttgttcgccgggccaactggcgtagggaaaactgaagttacggtacagctttcaaaagcgctgggtattgagctgttgcgcttcgatatgtctgaatatatggagcgtcatacggtgagccgtttgatcggcgcacctccgggatacgtcggtttcgaccagggcgggctgctgacggatgcggtgattaagcatcctcatgcggtgctgttgctggatgagatcgaaaaagcgcacccggatgtctttaacctgctgctgcaggtgatggataacggtacgctgaccgataacaacggccgcaaggcggatttccgcaacgtggtgctggtgatgaccaccaacgctggcgtgcgagaaaccgaacgtaaatctattggtcttattcatcaggacaacagtaccgatgcgatgggcgagatcaagaaagtgtttacgccggagttccgtaaccgtctcgacaacattatttggttcgatcatctgtctggcgaggtgattcatcaggttgtcgataagtttatcgtcgagttgcaggctcagttggatcagaaaggcgtctctctggaagtcagtcaggaagcgcgcgactggctggcggaaaagggctatgaccgggcgatgggcgcacgaccaatggcgcgtgtgattcaggataacctgaaaaaaccgctggccaatgagttgttgtttggatcgctggttgacggcggacaggtcaccgtcgcgctggataaagagaaaaatgcgttgacgtatgacttccagagtgcgcaaaagcacaagccggaagccgcgcactaatcttcgtttcactgtcgtacaaaccgggccttagcgcccggtttttttgtctatggaaaacccccagctaggctgggggttccggaaagctttcagctttaagccagttattaaaaccccttttgatttgttaaaacatcttgcggtctggcaactgcaaaagttcaacaagaaatcaaaagggggtcccaatgggggacgaaaagagcttagcgcacacccgatggaactgtaaatatcacatagttttcgcgcccaaataccgaagacaagcgttctatggagagaagcgtagggcagtaggcagcatattaagaaaattgtgtgaatggaaaaacgtacgaattctggaagcagaatgttgtgcagatcatattcacatgcttctggagatcccgccgaagatgagtgtgtcgagtttcatgggatatctgaagggtaaaagtagtctgatgctttacgagcagtttggggatctaaaattcaaatacaggaacagggagttctggtgcagagggtactatgtcgatacggtgggtaagaacacggcgaagatacaggactacataaagcaccagcttgaagaggataaaatgggtgagcaattatcgatcccgtatccgggcagcccgtttacgggccgtaagtaacgaagtttgatgcaaatgtcagatcgtatgcgcctgttagggcgcggctggtaagagagccttataggcgcatctgaaaaacctccggctatgccggaggatatttatttacgccggataatagttagcctgatagcgttgtgctcgcggtaggcggataaggcgcttgtaaattgcgtcatcatccggtaatcgacgggtcaaatgcgaaaaaaagtccgtactttcgtacgaactctttcttgaatatggcggtgaggggggattgactcgctgcgctcgcccttcgggcagtctcctcgcaggctcgtcgtttgtccaactggctgcgccgctactcagcccatccctgggcctcgccccttcggggccagagcaagctctgttcaaaaacgctcccggcgtttttgtgtcgaaccccggtcgggtgttctcatcccccctgtagggtggctttattgactagtcctgatataggttgacagttttttgtctgtaaaacgcctgatgaacatcatcgggcgttttgtatttcagggccaggtgtggccgttcatggttataaattgccacggactcttttactatttcccgcgcttgctccaggtctgcaggacgcgagagtaaaaactcatttttcagtatcccgtttattctctcagccagcgcattctggtagcagtcgtaaccatcggtcattgaacaggttattccgtttcgctcatgaactgactgataaagtaccgaacagtattgcagtcctctgtcagagtgatgtaccagcggacctgtcgtttttctccgcctcagagcctgcctgaacgcctttaccacattttctgtctgcaggttttccccgacatggtaacccacgatttttctggagcaggcatcggtgaccagactcagacaggccgtgccgctgcgtagtggaaggtaagtaatatcggcgacccagacctgctctggctcaagggcggtaacctgttcagggccgggtttcagcagattaggatgccggtaaaagcgatgatggctgttggtggttttgtgatatgcccgtttcacgggtaccaggagccggtattcacccagcagattaaacagacggtcccgtccgatattcagcgttttatcggcctgcatgttcagcagatagtgcagtttacgcgtaccgattcgcggctggcggcaccgggtacgggcaacaaaatcaagaacctgagcatgatgctcctgccgtttattacatcttgtattgtactggtaccacgcctgtctgctgtgccccaggaactgacatgcacgcgtaactgttattttgggggcctgactttgcgtgaggacttgccgggccgcttttttacaacacttaccccgtaatcatttttcaggacgttgataacggactcaaaaaactcagctttctggtttgccagctcaagctgttcttcaagttccctgattctttgctcgggtgtcagcgggatagttgtctgagccacaggcagtttcctcttcaccaggtcaggaagtccgggtctccagtcaagccggccatatttacgcagccagacaagtacggtggagcgcccctgaatgccatatcgctgctgggcctgtttataggtcatctcgcctttttcgacctgctcaacgacggctattttaaaggatagaggataatcgcgttgggtgcgtttgaactcagtcatcatcacgttctccggatttaagtctggaacgtgtcaacgctattcaggacgggtcatatgtgaaaaaaaagcccgtactttcgtacgagctctttcttgaatatggcggtgagggggggattcgaacccccgatacgttgccgtatacacactttccaggcgtgctccttcagccactcggacacctcaccatattgtattgctgcctgaccacttggggggcaacggggcgctactatagggagttgcgctaaaacggtcaagcagaatttacatattcactgtcgtttgctcatgcaatagacataatccccgcccaaactggcgcggggaggcaaattaacgctgtgaatccaacatttcgttgtttttcaccacatcctgcgctttgctgtagctttctatcagcagttgataggccgggaatacctgagtataaacgtcggcccacgcggcggcgtcttcacggttccaggtgccttgcagctcagaggcgactgcggcagtatccatcggtacgacgccagcctgtacgatacgcgccagggtgatctcctgcgccatcttactgtaggtaccggatgcgtcgatcacggcaaataccttataaccttccgctaccgcgctaatggccgggaatgccatgcacacgctggtaatcgtcccggcaatgatcagcgtcttacgacccgtcgcttttaccgccttaacgaaatcttcgttatcccaggcgttaatttcacctttgcgcgcaatgtactgcgcatgtggcgcattagcgtggatctccgggatcagagggccgttcggaccttgcggtacggatgccgtggtaatgaccggcattttcgctaacgtcgccatcttcgccaacgccgcggcgcgagcgcgtaattccggcattggcatatcgcctacggtctggaaaagaccgctttgatgatcgattaaaagcatcacggaatcgttaacatcaattaccgggcgcaaaccattaaaattagcaggacttgacatcgtattctccttcatgttttcagatttggccaaaacggccggagttgaaatcgcgaactgcttctgcgatctcttgtttcgtgttcataacaaatgggccgtaacccacaatcggttcattcagtggctcgcctgataacagcaatacgctggcgtcgctgctggcctcaaggtgcagcgttttcccttgctggctcaacaccaccagttgcgcttcgttgaccggcgtcgtgccgttcaccgtgatattgcctttcagtaccaccagcgcggtgctccatccttccggctgtgccaatgtaagctggcgattgcgttgcaggcgcatatcccagacattgagcggcgagaaagtgtgcgccgggccttttgtctcttcataacgccctgcgatgacccgcacgactccggcgttatccggcaacgtaacggtcgggataacatcgtgggtaatgctttgataacccggggtggtcattttgtccttcatgggaaggttaacccacaactgcaccatttccagttcgccgccccgacgggtaaacgcgtcggaatggaactcttcatgcaaaatgcctgcgcctgcggtcatccactgaacgtcgcccgggccgataacgccgccgcgaccggtagagtcccgatgctcgacttcgccactataaacaatcgtcacggtctcgaaaccgcggtgtggatgctccccaacgccgcgtttttcattacccggcgtaaaggtgtgcggcccggcataatccagcagcaggaagggactcaactgctgcgcatgtgactgataagaaaagagtgaacgaaccggaaatccatcgccaacccagtgcgggcgaggtgcggtatagacgcctgtaatctgtttcatggtgttctcctcagtggcgttgtcttgatgtgaataagcttatattcatgacaaaaggttcggtagtggctaaaatggctcataccgttccattaataggacaatgtaatgataaaaacggatctcaatgattttgcgtggtttgtgcatgtggtcgaagagggtgggtttgccgcggcggggcgtgcgcttgatgaaccaaaatcaaaactgagccggcgtattgcgcaactggaggaacggctgggcgtgcgattgattcagcgaaccacccggcagtttaacgttaccgaagtggggcaaacattctatgagcactgtaaagcgatgctggtggaagctcaggcggcgcaggatgccattgccgcattgcaggtagagcctcgcggtatcgtgaagctgacctgcccggtgacgctgctgcatgtacacatcggcccaatgctggcgaaatttatggcgcgttatcctgatgtttcgctacagcttgaagcaaccaatcgtcgggtggacgtcgtaggggagggggtggatgtggcgattcgcgtcaggccgcgcccgtttgaggatagcgacctggtgatgcgcgtcctggctgacagagggcatcgcttgtttgccagcccggatcttatcgcacggatgggaatcccttccgcgccggcggagttgagccattggcctgggctaagtcttgcatccggcaagcatatccaccgctgggaactttacggcccgcagggcgcgcgtgcggaagtccattttaccccgcgtatgattaccaccgacatgttggcgctacgcgaggcggcgatggcgggcgtggggcttgtgcagctacctgtcttaatggtgaaagaacaactggccgccggtgaactggtcgcggtgctggaagagtgggagccccggcgggaggttattcatgctgtgttcccatcccggcgaggattattaccttccgtacgtgcgttggtcgattttttgacggaagagtatgcgcgaatggtggaagagtaacctgctcgtcattcatcaacttaatggacgcaaaaaaggccggttaaaccgaccttttatccagccgcccttcagggcgtgaggagacaattagcgactacggaagacaatgcggcctttgctcaggtcgtacggggtcagctcaacggtcactttgtcgcccgtcaggatgcggatgtagttcttacgcattttaccggagatgtgtgcagtaaccacgtgaccgttttctaactctacgcggaacatggtattaggtaacgtttcgagaacggtaccttgcatttcaatattgtcttctttggccatctaatcctctggggtatcactaccataatttgaaccggcaagataatgccgaacttcttttgataagtaaagatttgtgcgtttaaaacacagcaaaccaggtttagcacatgattccgcgacacacgacaacgccgcgttatacaccttttccctgatactaccgcctgatgtatcgacataagcgcaacatataagggaacggtgaaataaacgatgggcgttacctgacaacgggctgcgggataatgagctaaaccaattctgcggcagcaattataacaccccaataaaaaatgtgccgaaaacattcacttccggggcaaaaataatgtccgcggcacccaaaaacgggaggccagcggctgttggcgtaaggccgcgaggtgatcgaggtagtcacgacgtggaatttcaatggcgccgagcgaggcggtatgactattaagtacctgacaatcaataagtttaccgccgtgacgggtaaattcagcgcaaaaaaccagcagtgcggttttagaggcattctcctggcggctaaacatcgattcgccgcaaaacagcgccccctgcgagacgccatacatcccgccgaccagttcccgatcgcgccacacttcaatggagtgcgcgtggcccaattcatgtaatcggcgataggcttcctcaataccacgcgttatccaggtgccttcgtcacggtgattggcgcatccatcaatgacccgatcgaaagcgtaattgagcgtcacgcggtaaggggatgcgttgtgaaagcgcttcatactgcgactgaggtgaaacttttcaggccacagcacggcgcgaggatcgggcgaccaccacagaatcgggtcgcccggcgaaaaccacggaaaaatcccgtgctggtaggccattaacaaccgggcagggctgagatcgccgcccagcgccagtaaaccgttaggctcgcgtaaagcgccttccggcgaagggaaggcgatagaatgtcgggaaagctgaaccagacgcatgacggcgaaactccagtacgcaagtcggatcgttcaataatagcttacagacgttgtttaaactgataatagcgcccttgtccggctaacaattctgcatgagtgcctcgctcaatgatgtgcccgtcgtccattacgatgatttgatcaaaacgggccaggccgcgcaaacggtgagtcaccatcaggacggttttctcgcgcatcacatcggcaagtaattccagcatttcgctctcggtggtcgcatccagcccctcagtaggctcatccaacagcatcaacggggcatcgtgcaacagcgcgcgggcgatggccagacgacgaagttcgccgccggatagcagacgaccgccttcgccgagccagctattaagcccactatcttcgagcagattttcgaggccgacgcgacgcagcatgtcggaaagggcttcgtcgctggcattgggcgccgccagtaataaattatcacgcagcgtggcgctgaacaggtggacacgctgcggcaccacgctgatagtccggcgtaaggcggattcgctcagcgaggatagcggaagatcgttgagcagaatttcgccttgttgcgggtcccaggcgcgggtgagtagctgcaacagcgttgattttccgcagccggtacgccccagaatagcgacatgctcgccaggattagcctgtaatgagagggcattgagcgcattaatcggctggtcgggataacgaaacgaaacgtcccgcagggtgagtgtgaccttttccggcgcgggagtttctgcttgcggaaaggtcacctccggtttttgctccgttaattcagtgatacgaagcgcagaggcgataacctgccccagatgctggaatgcgccggtaacgggcgcaagcgcctcgaaagccgccagcgcgcagaagacaaacagcgcgatgagcgcgccgggctgcgtattgccgccaacgccgccggaggccatccacaacattaacatcaccgccagcgcaccaatcagcagcattaacgcctgcgataaggcggtgagttcagactgtcggcgttgggcctcatgccattgtaattcggtggcttccatttgcgcccgatagcgtttgctggcgccaaaaatggtgagttccgcctggccctgtaaccatgacgtgagctgctggcgatactgaccgcgtagatgcgtcagattttggccggtatttttgccggcgcgataaaacaccggcggcataataaacagcgtcaacagcataatgccgcccagcgtgatcgccagcgtcacgtcgagaacgctaagccccagggtgacaatcataatcactacaaaagcgccgaccagcggggagatgacgcgcaaatagagatggtccagcgtgtcgacgtcggcaacgatgcggttcagcagttcaccttgctgataacgcgccagactcgcgggggagagtggtagaagtttgctaaaggtataaatacgcagatgttgcagtacgcggaacgtggcgtcatgacttaccagacgttcaaaataacgaccagcggtacgggtaatggccgcgccgcgcacgccggctgccgggagcatatagttaaaactgtaaattcccgcgaagcctgcgatagcggacgcggacaggaaccagccggaaagcgtcagcagcccgatactggcaagcagtgtcaggattgccagcgcaattcccagcgttagcatccatttatggcgtttataaagcgtcagataagggagtagcgcgcgcatttaaatatcctcctgacggtgagccaataacgtcgcaaaagcgccgttggcggcgctgagttcagcataactgccttgttcgacaatcgcgccatcttgcataacccagatagcgtcccagtcggcgagatcttccaactgatgcgtcaccattaatgtggtctggcgttttgacgccgcttttaacgcctgcatgacgcgttgctcgctgtgagcgtccaggcttgccgccggttcatccagcagtagcagttgacagggattaagtagcgcacgggcgaccgctacacgctgtgcctggccgacggaaagtctgctggcatgattgccgagcggggtgtctactccctgcggcagcagcggtaaaaactcgcttacccatgcggcgtcaagcgcggcataaagttcctgctcgctggcgtccgggcgcgccagtaatacattttcgcttagcgtcgctgcaggtaattgcgggttttgcccaacccaggagagatgctggcgccaggattccggcgagagatcgcgaagctcgacaccgttaatacgcaaagatccctgataggagagaaaaccggataatacattcaacagagagcttttaccggaaccgctgcgtcctaccaggacggcgcgttctcctgccgctaatgagaaattcagcggcccggcaagcgttttgccttctggcgaggtgataataagattgactgcgtcaatggttacaggttcgttttccgccagctcaacttcgccgcgcgccgggtgggcaaggggtgtttccagaaacgtcttcagactatccgccgcgccaaccgcctgcgccttagcatggtaaaacgtgccgaggtcgcgtaacggctggaaaaactccggcgcgaggatcaaggcgaggaacccggcggcgagcgtcacgccggtaccgtaatgaccaaagttcagttcgcccaggtaagagaagccaaaataaacggcgaccagcgcaatagaaagcgaggtgaaaaattccagcacgccggaagataaaaaggcgaggcgcagtacttccatcgtgcgctgacgaaaatcctgcgatgctgcgcgaatgctttcggtttccgcttctccacgaccgaaaattcgcagcgtttccatcccgcgcagacggtcaagaaaatggccgcttagccgggcaagcgccaggaaattgcggcggttggcgtcagccgcgcccatccccaccattgccataaataggggaatgagcggggcggtgcccagcagaatcagcgccgccgcccaatttgacgggaaaatcgccgccacgattaagagcggtacgcaaacggcaagcgccatttgcggcagatagcgcgcataatagtcatgcatatcgtcaatctgttccaataccagcgtcgcccagctaccggcgggcttgccctgaatccaggctgggccggcttgctgcagacgatccaacacctgacggcggatctcaaagcgaatatgttgtccggcatgaaaaccgacgcgctcgcgcaaccacaccacccaggcgcggaggacaaagaccagtatcagcaggataaaagggagcaacagcgcttcccgtggaatgttctccatgatcatatgttgcaggatacgcgccatgatccaggcctgagcgacaattaatacgccactcatgaaccccaacaggcgggaaatattcaaccaccgttgggagattacgctttgctgttttaaccagcgggtcagctctttttgacgggttttattcattgcacgcttagcaggtgagttattggaatttcaggcagggcaatgttacaacgacgcaaaaataaaggcgacttatagtcgccttttttacttttgttactgatttgtaaaaactatttgctcgcgtcggccagaccatcgagatagcgttcagcatccagcgccgccatacagcccgtacctgcagaggtgatcgcctgacggtaaatatgatccatgacgtcacccgccgcgaatacgccagggatgctggtttgtgtggcgttgccatgggtgccggactgaactttgatataaccattttccagctcaagctggccttcgaagagcgccgtgtttgggctatgaccgatggctacgaaaagtccggcgatgtccagcgtctcgatattatcgctctgctgcgtgtcgcgaagacgcagaccggtgacgcccatctgatcgccggtcacttcttccagcgtccggttggtgtgcagaatgatattgccattttcgactttatccatcaggcgcttaatgaggattttttcagcgcggaaaccgtcacggcgatggataaggtgcacttccgaagcgatgttggacagataaagcgcttcttcaaccgcggtgttgccgccgccgatcaccgctactttctgattgcggtagaagaaaccgtcgcaggttgcgcaggcggaaacgccgcgccctttaaaggcttcttccgatggcagccccagatagcgcgcggaagcgccggtcgcaatgatcaacgcatcacaagtgtactctgcgctgtcacctgtcagacggaacggacgattttgcagatccacgttgttgatgtgatcaaaaattatctcggtttcaaattttgccgcatgttcatgcatgcgttccatcagcagcgggccggtcaaatcgtttggatcgccgggccagttttccacttccgtcgtggtagtcagttgaccgcctttttccataccggtaataagtaccggctgtaaatttgcgcgcgcggcatacaccgccgcggtatatcccgccggtcctgagcccagaataagcagcttactgtgtttggtcgtgcccatgagatccccatagttgttggcagacaatgagcagaattgtagggaatttacagacgtaaaaaaagagcataacgattttgttaacaatatgtgtaatagcatgaaccgatgaacggccgcgacagcgacgttatcatcacaaactttaattaaaatcggtaacttataaggtgacgaaatgacagtttaccgccctctctaatgaataactggcatgttgtactaaaaatcgatgttttgctttgacaatcacctgctgttttgcgaaaacattcgaggaagaaaaaactgtgttatgtatgtgctgcataatcatgcatgtaaataccatgtttaccgggctagtgaaatctacgcatggcgtggacagacgccattcgtgatgtcgatagctgccgcgaggcaacggtcttctcaccatagaccaggcattgcgcgccgttaatccctctgggtttcggtctatcgtgatgggcagcgactctgaacagtgatgtgagtagagtcaggcaggagtagggaaggaatacagagagacaataataatggtagatagcaagaagcgccctggcaaagatctcgaccgtatcgatcgtaacattcttaatgaactgcaaaaggatgggcgtatttccaacgtcgagctttctaaacgagtaggactttcgccgacaccttgccttgagcgtgtgcgtcggctggagcgacaggggtttatccagggctatacggcgctgttgaacccgcattatctggatgcgtcacttctggtattcgttgagattaccttaaatcgcggcgcgccggatgtgtttgaacagtttaatgccgccgtgcaaaagcttgaagagattcaggagtgtcatttggtttccggcgatttcgactacctgttgaaaacccgtgtaccggatatgtcagcgtatcgaaaactattgggagagacgttgctgcgcttgccaggtgtgaacgacacccgaacttacgtagtgatggaagaggtaaaacagagtaatcgtctggttattaagacacgctaacacggaacaggtgcaaaatcgctgtagtttgattacactcctgttaatccatacagcaacagtgccggggcaacccggtgctgttgtccgttttagcatcgggcgggaaaagcctggaacctggagagccttttttgagccaggaatatactgaagacaaagacgtcacattgacgaagttaagcagcgggcgccgacttttggaagcgttgttgatacttattgccctttttgccgtctggttgatggcggccttgttgagctttaacccttcggaccccagttggtcgcaaaccgcctggcatgaacccatccataatttaggcggcgcgccgggcgcgtggctggccgatacactgttctttatttttggcgtaatggcctacaccatccctgtcattattgtcggcgggtgttggtttgcgtggcgtcatcagtctacggatgattacatcgactattttgctgtgtcgctacgccttatcggcgtgctggcgctgattctcacttcctgcggtctggcggccattaatgccgacgatatctggtatttcgcctccggcggcgtaattggcagcctgttaagcaccacgctgcagccgttgttgcatagtagcggcggaacgataatgcttctctgtatttgggctgccgggctgacgctctttaccggctggtcctgggtcagtatcgccgaaaaattaggcggctggctgcttaatatactgaccttcgccagcaaccgtacccggcgtgatgatacgtgggttgacgacgaagagtatgatgacgaatacgatgaagaaaccgacggcgtgcagcgtgaatctcgccgggcgcgtattttgcgcggcgcgttggcgcgtcgtaagcgactggctgaaaaattcagcaatccacggggccgtcagaccgatgccgcgctcttttccggcaaacggatggatgatgacgaggacattcagtatagcgcgcgcggcgtcgctgccgatcccgacgacgttctgttttcgggcaaccgtgcgacgcagccggaatatgatgaatatgatccgctgttaaacggccattctgtcaccgaaccggtcgccgccgctgcggctgcaactgccgtcacccagacgtgggcagcgtccgccgatcccataatgcaaacgccgcccatgcctggggctgagccggttgtcgcgcaaccgaccgtggagtggcagcccgtaccggggccgcaaaccggcgaaccggttatcgcgcctgcgccggaggggtatcagccgcatccgcaatatgctcaaccgcaggaggcgcaaagtgcgccgtggcagcaacctgtgcctgtcgcttccgcgccgcaatacgccgcgacgccagcgaccgcagcagaatatgactctcttgcgccgcaggaaacacagccgcaatggcagccggagccgacccatcagccgacgccggtttatcagccggagccgatagcggctgaaccttctcacatgccgccgccggttatcgaacagccggttgccaccgagcctgaacctgacacagaagagaccagacctgcccgtcctccgctttactattttgaagaggtggaagagaaacgcgcccgtgagcgcgaacaactggcggcatggtatcaaccgattccggagccggtaaaagagaacgtgccggtcaaacctacggtatctgtcgcgccgtccataccgccagtggaagcggtagccgccgccgcgtcgcttgacgcaggtattaagagtggcgccctggcagcaggcgccgcggccgctgcgcctgcatttagtctggctaccggcggcgcgccgcgtccgcaggtgaaagaggggattggtccgcaactgccgcgtccgaaccgcgttcgcgtgccgacccgacgggaactggcatcgtacggtattaagctgccgtcacagaggattgcagaagaaaaagcccgcgaggcggagcgcaatcagtacgagacgggcgcgcagctaaccgatgaagaaatagatgcaatgcatcaggacgagttagcccgtcagtttgcgcagtcgcagcagcatcgttatggtgagacgtatcagcatgatacgcaacaggcagaagatgacgataccgctgcggaagctgaattagcccgccagtttgccgcttcgcaacagcagcgctattccggcgagcaacccgctggcgcgcagccgttctcactggacgatctggatttctcgccaatgaaagtattggttgatgaaggtccgcacgaaccgctgttcacgccgggtgtcatgcccgagtcaacgcctgttcagcaaccggtagcgccgcagcctcagccacagtaccagcagccgcaacagccggtagcgccgcaaccgcagtatcagcagccgcagcagccggtagcgccgcagccgcagtatcagcagccgcaacagccggtagcgcctcagccgcagtatcagcagccgcaacagccggtagcgccgcagccgcagtatcagcagccgcaacagccggtagcgccgcagccgcagtatcagcagccgcagcagccggtagcgccgcagccacagtatcagcagccgcagcagccggtagcgccgcagccacagtatcagcagccggtagcgccgcagccacagtatcagcagccgcaacagccgacagcgccgcaagacagcttgatccacccgctgttgatgcgtaacggcgacagccgtccattacagcgtccgacgacgccgctgccttcgttagatcttctgacaccgccgccgagcgaagttgaaccggtagatacctttgcgctggaacaaatggcgcgtctggttgaagcgcgtctggcggatttccgcattaaagctgatgtggtgaactattcgccaggcccggtcattactcgttttgaactgaatctggccccgggcgttaaagcagcgcgtatctccaacctttcccgggatctggcgcgctcattgtcaacggtagccgtacgcgttgtggaagtcattccaggcaaaccttacgtagggttggaattgccgaacaagaaacggcaaaccgtttatctgcgcgaagtgttggataacgccaaattccgcgagaatccgtcgccgcttaccgtggtgttaggtaaggatatcgcgggcgatccggtagtggcggatctggcgaaaatgcctcacctgctggtggccggtacgaccggttccggtaagtcggtcggggttaacgccatgatcctcagtatgctgtataaagcgcagccggaagacgttcgctttatcatgatcgacccgaaaatgttagaactctcggtctatgaaggtataccgcatctgctgacggaagttgttaccgacatgaaagacgcggctaacgcgttacgctggagcgtcaatgagatggagcgtcgctataagctgatgtccgcgctcggcgtgcgtaatctggctggttataacgagaaaatcgccgaagcggcccgcatgggacgtccgattccggacccgtactggaagccgggcgacagtatggatgttcagcatccggttctggaaaaactgccgtatatcgtggtactggttgatgaatttgccgacctgatgatgaccgttggtaaaaaagttgaagagctgatcgcgcgtctggcgcagaaagcgcgcgccgcggggattcacctggtactggcgacgcagcgtccgtcggtcgatgtgattactggtttaattaaagccaacattccaacccgtatcgcttttaccgtatccagcaagatcgactcccgcaccattcttgatcagggtggcgctgagtcgctgctaggtatgggggacatgctctactccggaccaaactccaccatgccggtacgtgtccatggggcgtttgtgcgtgaccaggaagtccatgcggtggttcaggactggaaagcgcgcggtcgtccgcaatatgtggatggcattacctccgacagcgaaagcgaaggtggcggtggcggttttgacggcggcgaagaattagatgcgctattcgatcaggccgttaatttcgtcactcagaagcgaaaagcgtccatttccggcgttcagcgtcagttccgcatcggctataaccgtgcggcgcgtattatcgaacagatggaagcgcagggtattgtcagcgctcaggggcataacggtaatcgtgaagtgctggctccgccgccttttgagtaaacctgtaagccggatggcgctgtgcaggctgccatccggcaacaaaattcagtattttcttctttcctcatgctgatttttggcctggaatagaaagcaaaaggagctcctggtcgggagtgtcgaaacctgaggaataatgatgaaaaaaatggcaatcgcctgtgcattactttcaagcgttgtagccagcagcgtatgggctgacgccgccagctctctgaaaagccgtctggataaagtgagcagctttcatgccacctttactcaaaaagtcaccgatggcagcggtgccgcggtgcaggagggacagggtgatttatgggttaagcggccaaatctattcaactggcatatgacgcaacctgacgagagtattctggtttctgacggcaaaacgttatggttctataacccgtttgtagaacaggctaccgccacgtggttgaaagatgccactggaaatacaccgtttatgctgattgcccgcaaccaggccagcgactggcagcagtataatattaagcaggacggcgataattttgtgctgacgccgaaagccagcaacggcaatctgaaacagttcaccatcaatgtgggacgcgacgggactatccaccagtttagcgccgtagaacaagacgatcagcgtagcgcctatcagctaaaatcccagcaaaacggcgcggttgatccgtcaaaatttacgtttactccgccgcaaggggtaacgatagacgaccaacgtaagtagaggcgatgagtgagcaatctgtcgctcgatttttctgataatacgtttcaaccgctggccgcgcgaatgcggccggaaaatttagcgcagtatatcggccagcagcatttgctggccgcaggtaagccgttgcctcgcgctattgaggccgggcatctgcactccatgattttatgggggccgccagggacggggaaaaccacgctcgctgaagtgatcgcccgctacgccagcgccgatgtcgagcgtatttccgccgtcacttctggggtaaaagagattcgcgaagctatcgagcgcgcccgccagaatcgtaatgccggtcgccgtaccatcctgtttgtcgatgaagtgcatcgctttaacaaaagccagcaggacgcctttttaccgcatatcgaagatggcactatcacctttatcggcgcgaccacggaaaatccctcttttgagctgaactcagcgctcttgtcgcgagcgcgggtctatctgctgaaatcgttgaccactgacgatattgagcaagtactggaccaggcgatgcaggacaaaacgcgtggttacggcgatcaggatatcgtgttaccggatgagacacggcgagcgattgctgagctggtcaatggcgacgcgcggcgcgccttaaatacgctggaaatgatggctgatatggcggaggcggatgacagcggcaaacgcgttttattgcccgccttgttgaccgagatcgccggcgagcgcagcgcgcgttttgataacaaaggcgatcgcttctacgatcttatttccgccttacataaatcagtgcgcggcagcgcgccggatgccgccctctattggtatgcccgtatcattactgcgggaggcgatccgctgtacgtggcgcgtcgctgcctggcgattgcctcggaagatgtgggtaatgcagatccgcgcgcgatgcaggtcgccattgccgcgtgggattgtttcacccgcgttggcccggctgaaggcgaaagggcgatcgcgcaggctatcgtttatctcgcctgcgcaccgaagagcaacgccgtctataccgcctttaaggctgcgctggccgacgcgcgcgaacgtcctgattatgacgttcctgtccatctgcgtaatgcgccaaccaaactgatgaaagagatgggctatggccaggagtaccgctatgcccacgatgagcccaatgcctatgctgcgggtgaagtgtacttcccgccggaaatcgcgcaaacgcgctattatcatccgacaaatcgtggtctggaaggcaagattggcgaaaagctcgcctggctggctgaacaggatcaaaatagccccacaaaacgctaccgctagtgtaaacgttgcggtaaggttatctctaaatatgatgctccaggtatcatggcgttgatgatgaatctcgttatgcctgatagcacgttgcttatgaggtccgcgggtatagcgcaatggatgcgttgttgctgtcgtcggtctggtaaggcgaaaacgtcgctattacgtaaacgcggtttacgttcatcaatacaatcagaggcgatcatcaattgatcgcgtttccttttattattcgataagcacaggataagcatgctcgatcccaatctgctgcgtaatgagccagacgcagtcgctgaaaaactggcacgccggggctttaagctggatgtagataagctgcgcgctcttgaagagcgtcgtaaagttttgcaggtcaacacggaaaacctgcaggcggagcgtaattctcgatcgaaatccatcggccaggcgaaagcgcgcggggaagatatcgagcctttacgcctggaagtgaataaactgggcgaagagctggatgcggcgaaagccgagctggataccttgctggcggagatccgcgatatcgcactgaccatcccaaacctgcctgcggatgaagtgctggtaggtaaagatgaaaacgacaacgttgaagtcagccgctggggtaccccgcgtgagtttgattttgaaatccgcgatcacgtcaccttaggggaaatgcactccggcctcgactttgccgccgcggttaagctgaccggctcccgttttgtggtgatgaaaggacagattgcgcgtatgcatcgcgcattgtcgcagttcatgttggatctgcatacggaacagcacggctatagcgaaaactacgtgccgtatctggttaaccacgacacgctgtatggcaccggtcaattgccgaaattcgcaggcgacttgttccatacccgtccgctggaagaagaagcagacagcagcaactatgctttgatcccgacggcggaggttccgctgaccaatctggtacgcgatgaaatcatcgacgaagatcagctgccgattaaaatgacggcgcatacgccttgtttccgttctgaagcaggttcttatggtcgtgatacccgtggcctgattcgtatgcatcagtttgacaaagttgagatggtgcagatcgttcgcccggaagattctatggctgcgttggaagagatgaccggccacgcggaaaaagtgctccagctactgggactgccgtaccgtaaaatcattctgtgcactggcgatatgggcttcggcgcctgcaaaacctatgacctcgaagtctgggttccggcgcagaatacctaccgcgagatctcttcctgctctaacgtctgggacttccaggcgcgtcgtatgcaggcacgttgtcgcagcaagtccgacaaaaagacccgtctggtccataccctgaatggttctggtctggcggtaggtcgtaccctggtggctgtgatggaaaactatcagcaggctgatggccgcattgaagtgccggaagtattacgtccgtacatgaacggactggaatatatcggctaatcctcgctttctcctcttctaaaaagcgccttcgggcgctttttttatgccagtttgataccggacaataatccctaccctattaggggtaatactgatttcgaatgaaggtcagtttttaacactatttttctactttttcgatatatatcagactttatagcgatgctatcgctatataaaattctatacatcgttttattgtttttttattgtgagcagcagagtgagcccttatgaaaactaagatccctgatgccgtgctggcagccgaggtgagccgtcgtggtttagtcaaaaccaccgcgataggcggcctggcgatggccagtagcgcatttaccctgccatttacccgcatcgctaacgccgcagaggcaataagcccggcgaaaaccggcgagaaagtcgtctggagcgcctgtacggtaaactgtggcagccgttgtccgctacgtatgcatgttgtggatggcgaaatcaaatatgtagaaacggataataccggaaacgatgattacgatggcctgcaccaggttcgcgcctgcctgcgcggtcgttctatgcgccgtcgcgtctataacccggatcggctcaagtatccgatgaagcgcgtcggcgcgcgcggcgaaggtaaatttgagcgtattagctgggacgaagcctacgatatcattgccaccaatatgcagcgtcttatcaaagagtatggcaacgagtccatttatctgaactatggcacgggaacgctgggcggcactttgacacgttcatggccgccaggaaaaacgctggtcgctcgtctgatgaactgctgcggcggttatcttaatcactacggtgattactcttccgcgcaaatcgcagcgggtctgaactacacctatggcggctgggcggatggcaatagtccgtccgacattgaaaacagtaagctggtggtattgtttggcaataaccctggcgaaacccgcatgagcgggggcggtgtaacgtattatcttgaacaggcgcggcagaaatcaaacgcgcggatgatcattatcgaccctcgttacaccgacactggcgctggtcgcgaagatgagtggattccgattcgtccaggtaccgatgcggcgctggtcaatggtctggcatatgtcttaatcaccgagaacatggtcgatcagccgttcctggataaatattgcgttggttatgacgaaaaaaccttgcctgccagcgcgccgaaaaacggtcactacaaagcctatattctgggccagggtaaagacggtatcgcgaagacgccggagtgggcggcgcaaattaccggtatcccggcggatcgcattattaagctggcgcgagaaatcggcagcgctaaacccgcctatatttgccagggatggggaccacaacgtcatgctaatggagaaatcgccacgcgcgccatctcgatgctggcgatcctgacgggtaatgttgggattaacggaggtaatagcggcgcgcgcgaagggtcttatgccctgccatttgaacgtatgcccacgttagaaaacccggttgaaaccagcatctccatgtttatgtggaccgatgccattgaacgcggcccggaaatgacggcgctgcgtgatggcgtgcgggggaaagataagctggacgtgccgatcaaaatgatctggaactatgctggcaactgtttgattaaccagcactctgagattaaccgcacccacgaaatcctgcaggatgacaagaaatgcgaaatgatcgtcgttatcgactgtcatatgacctcgtcggcaaaatacgccgatattctgttgcctgattgcactgcttctgagcagatggactttgcgctggatgcctcctgcgggaacatgtcttacgttatcttcactgaccaggcgattaaaccgcgcttcgagtgtaagacgatttatgagatgaccagcgaactggcgaaacgtcttggcgtggaacaacagtttaccgaaggacggacgcaagaagagtggatgcgtcatctgtacgaacagtcgcgtaaatccattccgaatctgcccacctttgaggagttccgtaagcaaggcatcttcaaacagcgtgaccccgaaggccaccatgtcgcctataaagacttccgcgaagatccgcaagcgaatccacttacaacgccatcgggcaagattgaaatctattcacaggcgttggcggatatcgccgccacctgggagctgccggaaggcgacgtgatcgatccattaccgatctacacgccaggttttgaaaactataacgatccgctaacggataaattcccgctgcagttgacgggtttccactataaagcgcgtgtacattccacttatggcaacgtagacgtactgaaagccgcctgtcgccaggaaatgtggattaacccaatggatgcgcagaaacgcggtatcaacaatggcgacaaagtccgcatcttcaacgatcgcggcgaagtacatatcgaggctaaagtgacgccgcgcatgatgccgggcgtggtcgccctgggagaaggcgcatggtatgacccggatgcaaaacgcgtggatcagggcggatgtattaacgtactgacgacccaacgtccttctccgctggcgaaggggaacccgtcacatacgaacctcgttcaggttgaaaaggcgtaaggagtaaccgatgacaacccagtatggattttttattgattccagccgttgcaccggttgcaaaacctgcgaactggcctgcaaggactacaaagatttgaccccggatgtcagcttccgccgcatttatgagtatgcgggcggcgactggcaggaagataacggcgtctggcaccagaacgtctttgcctactatctctccatctcctgtaaccactgcgaagacccggcctgcaccaaagtctgcccgagcggcgcgatgcacaagcgcgatgacggttttgtggtggtgaacgaagaggtctgtatcggttgccgctactgccacatggcctgcccgtacggcgcgccgcagtacaacgcggccaaaggtcatatgaccaagtgcgatggctgttatgaccgggtggcggaaggtaagaaaccgatttgcgtcgaatcctgcccgctgcgggcgctggactttggtcctatcgatgaactgcgcaaaaaacacggtgagctggctgccgtcgcgccgttgccgcgcgcgcatttcacgaagccgaatattgtgattaaacccaacgccaacagccgcccgaccggggacaccaccggttatctggccaatccgaaggaggtataagatgggaagtggatggcatgaatggccgttgatgatcttcacggtctttggtcagtgcgtggccggtggttttattgttctggctctggcgctgatgaagggcgacctgcgcgcggaaacgcagcagcgggtgatcgcctgtatgtttggtctgtgggtgctgatggggattggctttatcgcctcgatgctgcatctgggctcgccgatgcgcgcgtttaactcgcttaaccgcgtgggtgcttccgcactgagcaatgaaattgccagcggctcggtgttttttgcggtcggcgggatcggctggctgctggcggtactgaaaaagctgccgccggcactgcgcacactctggctgattatcacgatggtactgggcgtcgtcttcgtctggatgatggtacgcgtctataacagcatcgatacagtaccgacctggtatagcgtctggacgccgctgggcttcttcctgacgctctttatgggtggcccgctactgggttatctgctgctgcgcatcgcgggcgtgaacggttgggcgatgcgtttgttgcctgcggtttcggtgctggcgctggtggttattgccattatggtggccatgcagggcgcggaactggcgacgattcacagttccattcagcaggcgtctgctctggtgccggattatggttcgctgatggcctggcgtatggtgctgcttgcggcggcgttgtgctgctggattgtgccacagttaaaagggtatcaacctgcggtaccgttgctctctgtcgccttcattctgatgctggcgggggaattgattggccgcggcgtattctatgggctgcatatgaccgtgggcatggcggtagccagttaacgcgttgacgcgcattcggcctgcagaacgtgcaggccgaattcgcctttagccgccatcaatctaaggaatataaccggggcggagaaggcgcatataaatccatagagaagaaaacgaagctaaaggaaccatgaaatttttcgactgaacaaaacgccgattttgcgggttagattaataaaaacaagaggatgaatttttagcctttcaatatattcacgcgcagaataagtaaatcaaatcgatagtctcaaaacttgcggatcgcccatgcggagccgattgacaatgtttttggcgatggcatgatgcgcatgaaatttgaacttcctcacggtttttattcatgtccacctatacccgtcccgtcatgcttttgctgtgcgggctacttttgttgactctggccattgcggtactgaatacgcttgtgccgctgtggcttgctcaggcaaaccttccgacctggcaggtggggatggtcagctcgtcttattttaccggcaatctggtcgggacgttatttaccgggtatttaattaaacgcattgggtttaaccgtagctattatcttgcctcgctgatcttcgccgcgggttgtgtcggattgggggtgatggtggggttctggagctggatgagctggcgttttattgccggtatcggctgcgccatgatttgggtggttgtcgagagcgcgttgatgtgcagcggaacctcgcataatcgcgggcgcctgctggctgcctatatgatggtctattatatggggaccttccttggacaattattggtcagtaaagtatctggtgaattgctgcacgttcttccctgggtgaccggaatgattctggcgggaattctgccgctactctttacccgaattgtaaatcagcaaacgcaggcacgtcattcctcttctattagcgccatgctgaagctacgccaggcgcgtcttggcgtgaatggttgtattatttccggcattgttcttggttcattatatggcctgatgccgttatatctgaagcatcaggggatggctaacgccagcatcggtttctggatggcggtgctggtgagtgccggtattttggggcaatggccaatgggacgtctggcggacaaatttggtcgcttgctggtgttacgcgtacaggtattcgttgtcatactcggcagtattgccatgttaacccaggcggcgatggcgccagctctgtttattctgggggcggcgggttttacgctttatcccgttgcaatggcctgggcctgtgaaaaagtcgaacaccaccagcttgtggcaatgaaccaggcgctgttgttaagttatacggtagggagcctgttggggccgtcttttgctgcgatgttaatgcagaattattcagataatctgctgtttattatgatcgccagcgtatcgtttatttatctgctgatgctgttacgtaacgccggccagacacctaatcctgtcgcccacatctgactgttctctgaatcgtatgcaggacgtgagtcttgcatactctttgtttatgttttacgtgaaataattgacctgcataattttcttgctttactgaaaaataaaatgtgccgaaggttataattttgcgctcctctattttctctcttcgtctttaccgcgcataattccccgcttcatttatagtaatagcattgtgttcacgaaggatcgcgttatgccgaatgtgcaggaaaaacagttgcgatggtacaacatcgccttgatgtcgtttattaccgtttggggattcggcaatgttgtcaataactatgctaaccaggggttagtggttgtcttctcctgggtgtttatttttgcgctctattttattccttatgccttaatcgtggggcaactgggctcaaccttcaaagagggaaaagggggcgtcagtacctggattaagcatacgatggggccggggttggcttaccttgcggcatggacttattgggtcgtgcatattccctacctggcgcaaaagccgcaggcgatactcattgcattgggatgggctttaaaaggcgacggctcgttgataaaagaatataccgtcgttgccttgcaggggctgacgctggcattgtttgttttctttatgtgggttgcttcccgggggatgaaatcgctaaaggttgttgggtctgtggccggaattgccatgtttatcatgtcaattttatatgttgtgatggcagtgaccgcgccagcaattacaaacgttgaaattgcgaccactaacatcacctggcagtcatttattcctcatatcgattttacctatatcaccaccatctctatgttggtctttgcggttggtggggcagagaagatctcgccttatgtcaaccagacgcggaatccaggaaaagaatttccgaaggggatgctctttttagccgtcatggttgcggtctgcgctatcctcggttcgttggcgatgggaatgatgtttgattcccggcatatacctgacgatttaatgaccaatgggcaatattatgcattccagaaattgggtgagtattaccatatgggtaattcattaatggttatttatgccattgccaatactctggggcaaatcgccgcgctggtgttttctattgatgcgccactgaaagttttactgggtgatgcagacactaaatatatcccgcagcgcttatgtcgtactaacgcttcaggtacgcctgttaacggttatttgctgacattagtgttggtcgctatcttgattatgttgccaacgcttggcatcggcgatatgaacaacctgtacaaatggctgcttaatctcaattcagtcgttatgccgctgcgctatctgtgggtatttgtcgcctttattgccgtcattcgactggcgcaaaagtacaaacccgaatatgtgtttattcgcaaccgggcgttggcgttaactgtgggaatatggtgttttgccttcaccgcgtttgcctgccttaccggtattttccccaaaatggaggcgttcacgccggagtggacattccagctgacgttgaacatcgtgacgccttttgtcctggtcgggttgggattaattttcccactgctggcgcgtagaaacacataacgacgctcttttccacggcgctcctgtcaggcgagcgccttttaaggttacaggtgcctgggttccaggcggagaccacggtattaacaggcgccgggggcagcaatagttgtcagaccttcaacccagcagcagataagcgactctgtatttaatacctggttagcgcaatattgttaaccatgcctgtctgatggcggggtcgggtattttagcggtaagagcgttatccagacagcaaaacggctaccgtcatgggtagccgtttaaaagcgggtaagatagcaggcgattaatacatcactttatgaccatactgctcaagaataccctttacacgctccatggtctcttttttaggcggcttcacgccatccagtttatattcttcgcccattgccacccatttatgtttgcccagctcatgatagggcaacagttcgattttttcgacattacccatatcgcgggtaaactcgcccaggcgatgcgcggaatcatcgtcgtcagaccagccgggaacgacaacgtaacggatccagaccttcacatttttctttgataaatactgcgcgaattccagcgtccggtgattagagacaccgaccagattctggtggatctcatcattcatctgcttgagatcgagcatcaccagatcggtaacgtccaacagttcatcaatcaccgggtcataacggcgcacaaagccgttggtgtcgagacaggtgtggataccttcttttttacaggcgcgaaaccagtcgcgtacaaattctgcctgcaaaatggcctcgccgccggatgccgtcacgccgccgccagaagcattcataaaatgccgataggtcaccacctctttcattaagtcttcaacggtgatttctttaccgccatgcgtatcccatgtgtcgcggttatggcaatacaggcagcgcatcaggcagccttgaaaaaaggtaataaagcggatgcctgggccatcaacggtgccacaggactcaaaggagtgaatgcgaccaataaccggctttttatcagcagttactgcaacactttcatttgtaatacaattggttaagttactcatatcgcttcggctagctctaaataacatggggtttatggacacattccgggcatgttgagcaccctggtaagggggttgcatcctgtaaaaaagcggtactgcgagcgtaaattttggactacagaatgtgtggctgttccagaatgtgctgcaatggagctattttacctctattcagtataaaatatacggcaaatctatgctgcataactcgcaccgccagaaattctggctcattcatcagctcgtaacgcctcaaccgcaatacatactgcaagtgtatcatccatagcgccctggttttactgtttatgatccgcctcttttttcgaatggttggcgccgttttgttgtggtcagaacgaaaataattctcaacataattcagatgtgtccaaagaacgttatgcgctgtccagcgcctggcgtcgcattcaacgcgcaatcaggtgtaaatctgatgtcatttctaaacccaggctgattcaatctcttaaatagagtgtggttttaatcaaaaaatgagagcaacggattggatcttgctttcgcggtaaataatcaagggagttattatgccagttacgttaagttttggtaatcgtcataactatgaaattaatcattcacggctagcccgtttgatgagtcctgataaagaagaagcgctatacatgggggtatgggatagatttaaggactgcttcagaacacacaaaaaacaagaggtgctggaggtattatatacactcatccatggatgtgaacgtgaaaatcaagctgaacttaatgttgatataaccggcatggagaagatacatgcctttacacaattaaaagaatatgctaatccatctcaacaagaccgctttgttatgcgttttgatatgaatcagacacaagttttatttgagattgatggcaaggttattgataaatgtaatttgcatcgtctcctcaatgtttcagaaaactgtatttttaaagtgatggaagaagatgaagaagagttgtttcttaaaatatgtattaagtatggagaaaaaatttctcgctatccagaattattagaaggatttgctaataaacttaaagatgcagttaatgaggatgatgacgttaaggatgaagtttataagcttatgcgatctggagaagatcgaaaaatggaatgtgttgaatggaatggtactcttactgaagaggagaagaataaactacgctgtcttcaaatggggtcttttaatattactacccaattttttaaaataggttactgggaattagagggggaagtcctgtttgatatggttcatccaacacttagctatctgctacaagcatataaaccgtcattgtcatctgatttaatagaaactaacaccatgctgttttctgatgtattaaataaggattatgatgattatcaaaataataaaagagaaattgatgctattctaagaagaatatatagatcacataataacactttatttataagtgaaaagtcgagttgtcgcaatatgcttatataaaaagtcattaaaaaggccccactgatatggagccttttttgtacgctttttatggcgtaatttcagtcaaacccattacatggtctgcgtgaaggtacgagtaataacgtcctgctgctgttctttcgtcagggagttaaaacgtactgcgtaaccagatacacggatggtcagctgcggatatttttccggatgttccatcgcgtccagcagcatttcacggttcatgacgttgacgttcaggtgctgaccgccttcgatggacgcttcgtggtggaagtaaccatccatcagacctgccaggttagtcttacgaacttcgtcgtctttacccagtgcgttcggaacgatagagaaggtataagaaataccatctttcgcgtaagcaaatggcagtttagcaacggaggtcagagaagcgacagcgcctttctggtcacgaccgtgcatcgggttagcacctggtccgaacggcgcgccagcgcgacgaccatccggggtgttaccggttttcttaccatacacaacgttagaagtaatggtcagaacagactgtgtcgggatagcgccacggtaggtggtcagtttctgaattttcttcatgaaacgttctaccaggtcaaccgccatgtcatctacacgagcgtcgttgttaccaaactgcgggtattcgccttcgatttcgaagtcgatagccagaccatcttcgtcacgaatcggtttaactttcgcatatttgatggcagacagggagtcagcagcaacggacagacctgcgataccacacgccatggtgcggataacgtcacggtcgtgcagcgccatcagagaggcttcgtagctgtacttgtcgtgcatgtagtggataacgttcagcgcggtgacatactgtttagccagccagtccatgaagtgatccatgcggtccatcacttcgtcgaagttcagaacatcgcctttgatcggttcggatttcggaccaacctgcattttcagtttttcatcaacgccgccgttgatagcgtacagcatggttttcgccaggtttgcacgcgcgccgaagaactgcatttgtttaccaacgatcatcgggcttacgcagcatgcgatagcgtagtcatcgttgttgaagtccggacgcatcaggtcatcgttctcgtactgcagagaagaagtgtcgatggagactttagcggcgaatttcttgaagttcagcggcagtttttcagaccacagaacggtgatgttcggctccggagacggccccatggtgtacagggtgttcaggaaacggaagctgtttttggtgaccagagtacggccatcaacgcccataccgccgatagattcggttgcccaaatcgggtcgccggagaacagttcatcatattcaggagtacgcaggaagcgaaccatacgcagtttcatgaccaggtggtcaatcatttcctgtgcgtcttgctcggtgattttgcctgctttcaggtcacgttcgatgtacgcatccaggaaggtggatacacgaccgaaggacattgctgcgccgttctgagatttaaccgcagccaggtaaccgaagtaagtccactggattgcttcctgagcgttagtcgccggaccagagatatcgcagccgtatttagctgccatttctttgatctgacccagagcgcggtgctgttcagcgatttcttcacgcagacggatagtcgcttccagatttacgccgttttccagatcggattgcagagacgtaaactgtgcgaatttgtctttcatcaggtagtcgataccgtacagcgctacgcgacggtagtcaccgatgatacggccacggccatacgcatccggcagaccggtcagaacgccggatttacggcaacgcaggatgtccggagtataaacgtcgaacacgccctggttgtgagtcttacggtattcggtgaagatttttttgatcattgggtccagctcgcgattgtacgctttgcaggaaccttcaaccattttgatgccgccgaacgggataatcgcacgcttcagcggagcttcagtctgcagaccaacaattttctcaagcgctttgttgatgtagccagcgtcgtgagaagtgatggtggaagcaacggaggtgtcaaagtcaacaggcgcgtgagtgcggttttcctgtttaacgccttccattacgctgtcccacagcttggtggtcgcgtcagtagcgccagccaggaaggactcgtcaccctcatacggagtgtagtttttctgaatgaagtcacggacgtttacttcattctgccagtcacctttggtaaaaccttcccaggctgtggctaacttttcattaagctcggacatgtaacacctaccttcttaagtggattttttatttactgcgtgtaatgggcatcaacagattaatgatgctcgttaccacgcaggtaaatgacccagtatgtcaacccgaccaacaaaccgccgccgataatattaccgatcgtgaccggaatcaggttatcagtgatgaagctcatcacggtcaggtgagaaaaactttccggagacgaaccaaccgcggtccaaaactccggtgtagcaaaatcgcgtattacaatacccataggaatcataaacatgtttgcgatactgtgctcaaaaccgctggcgacaaacatggcgacgggcagtaccatgatgaacgctttgtccatcaggctacgacctgagtagctcatccacacggccagacaaaccatcaggttcgccagaataccgaggcagacagcttcaataaaagtgtggtgcattttgtggtcggcggtttgcaggacgttaagtccccattgaccgttggcagtcatatactcgccggaaagccacatcagtaacacgaaaagcagagcgccaatcaggttaccaaaatagacgtttaaccagtttttagccagttgcccccaggtgatgcgaccgctagctttagctacaacgatcagaacagtagaggtgaagagatcagcgccgcaaataacacagagaatcagtcccaaagagaaacagatacccccgataagtttcgccatgccataaggcatcgcgccagtaccggttgtcgcagtaatataaaaaacaaaggcaattgaaatgaatacgccggcggtaatcgccagatagaaagtcttaagcggatgtttcgttgctttatagacgcctgcttcttcagccactttggccattgctgcagggagtaaaaggtcaaaagggttgtcagctttcacactaactctctctttattaagtcggcgacgagatactaacaaagcattatagatgagaatttgatatagatcatatctcgcctggcttataggcccgtaagtcgcatggcttttatgcaattacggtgtaactttttgattatcctaataaaaataaattttaaaaattataaatagagttgaattttttcctgactcctcctgctgcacggttaattaatatggagtaatcaacaaataaagtaacatcactatgtcaattaatttaatatcaacaaccaatatttaaccttgttattacatttttcgccgtttagcgaaaataaataaaacggggccgcaaaggcgccccgtaatataacgcagccgagagggtaaacctaccctaagtcactcatatggccttattttgaccagtatgccgctttcgcgcgctgtaatttatcatacgcttttaacaaggactgatgcgccgggaacgcttgtagatcgtggtcgacagccggtagtccataaaaagccgcttcaccgctaagcgcggcgctggcggcctctacagcctctgcgccatacatttttataaaagcattgagatattgcagtggctgacgcgcatcttcttgcgacaggagcagcagagtttgcaggcaacggtaatagtttgcgcgtgtcggactaaagaccgacgaattgaactccatcgtccattctgtccagattagcgcctgctccaaatcgccgcccgctaacgctaacattgcttttaattcgccgacgcgcagtgtataccaaccattgtccgctccggtcgccagacccaacagttcacgcacgcgggtgaaatcgtcaaaaccttcttcatccaattgttcaatcagattgagataatcttctttattccaggcgctaccgggcagcgaaagcagagtctcacgaagatggctacccatattgttgttggccagccacagatcttcggcaggataaatatcagacattcccggtacgataatacgacaggcgtatacgccgagatgctcgtaatcggcaatgtaaacttctttatcttcagcagcaaagatggccatcagcgtggcgaattcttcttcggtagtgccggaaaaactccagtccgtgaacggataatcggcgtcctgtttgaacagatcccaggaaatcaggccgctggagtcgatgaagtgggtctccagattagtgtgctccgcgacttcttcatcatcgaacgttggtggcgtgaagacatcaagatctttcagaccgcgtccctggagtagctcggtcactgtacgctccagcgcaacgccaaagtcaggatgggcgccaaaagaagcaaagcaggtaccgttagccgggttgaacagcacgacgcagataaccggatacttaccgcccagcgagccgtcataggcgaaaatcgggaaaccctcggcttccagcgtggcgattgactccattaccgccggataacgcgccatcacctctgcgggaatctccggcagactgatactttccgcaatgatgcgatttttcacataacgctcgaagacttccgacagtccctgaacgcgggcttcattacgcgtattgccggcggacattccgttagagacgtacaggttgccgatgatattcatcggaatatacacggtctggttatcggactgacgggtaaatggcaggccgcagacgccgcgagcttcattgccggactgaagatcaattaactggcttccggtgagttcattttccggatcgtaaaacgcgcgcagacgggcatcaagcaagccttccggtacgtcgtcattttcagtcagcgggaaccacttttcgttcgggtaatgcacgaatggcccattggcgaccgtttcgccaagccagaaatcagcaaagaagtagttggttgacagacgctcgaagtattcgcccagcgccgaggccagcgccgcttttttggtcgcgccttttccgttggtaaagcataacgcgcactctttatcgcgaatatgcactgaccagacgtttggcaccgggttcagccaggaggcctcttcgatgtgaaagccgaggtcgagtaacttttgctggaagcgggcgatggagtcttccagcgcggcgtctttgccgggaataaatgtttgcgtcatgaaaatcacttttgtcgtacggaaagcgcgcaatgatacgggttttatgtgacgggcgctatctcgccgggacatcggcggaaataaaagtattggctatgcttttacactggcattcacaggaagagcataaaaaatgaaagcatttgatttgcaacgaatggcgctggataacgtgccggtagcgtttttgggggaagtggcgctgcgtagcttttacacctttgttctggtgtttcttttcttaaaggtgacaggacgacgcggcgtacggcaaatgtcgctttttgaagtgctgatcattttgacattggggtcggcggcaggcgacgtcgcgttttatgatgacgttccgatgctccctgttctggtggtattcatcaccctggcgctgctctatcgcctggttatgtggctgatggcgcatagtgaaaagttggaagatctgctggaaggcaagtcggtggtcattgttgaagacggcgaactggcgtgggaaaaactgcagcgctcgaacatgacggagtttgagttttttatggagcttcgcttgaatggcgttgagcaactggggcaggtcagactggccatcctggagacaaacggacaaatcagcgtctatttctttgaaaataaagacgttaagccggggttaagcattcttcctgagcactgtacgccacgctttatcgtggcgccggaggctggcgactatgcctgcgtacgttgcagtgaagtgatacgcatgaacgccggggaaaagcaattatgtccgcgctgcgcaaatccagaatggacgaaggcaagccgggctaaacgcgttgtttaacagcgaaaatatcggatttatacggttaatccggaagattctgttgtgtgacgcatgccgcattttctcctcgcattgttttacccattgcggcgcgtgtcactgaatgataaaaccgatattcacatgaataacgtttgcctgatgtctgtcaggcaggaaacaatgcagcgtggtgaggggaaatggctcaggtctttaattttagttcaggtccggcgatgctaccggcggaagtacttaaactggcgcaacaggaactgtgtgactggcacggtcttggtacgtcggtaatggaaattagccatcgaggcaaagagtttatccaggtcgctgaagaggcggagcaggattttcgcgatctccttaatatcccctccaactataaagttttattttgtcacggcggcggtcgcgggcagtttgctggcgtgccgctcaatctgctgggcgataaaaccacggcggattatgtcgatgccggttactgggcggcgagcgccatcaaagaagccaaaaaatactgtgcgccgcagattatcgacgccaaaatcaccgtggacggcaaacgtgccgtaaaaccgatgcgcgagtggcagctttccgataatgccgcttatttgcactattgcccgaatgagaccattgacggcatcgccatcgatgaaacgccggattttggcccggaggtggtcgtcacggcggacttttcttctaccatcctgtctgcgccgctggacgtctctcgctatggcgtaatttatgctggcgcgcagaagaatatcggtccggcaggactgacgctggttatcgtccgggaggatctgttaggcaaggcgcatgagagctgcccgtccatcctcgactacaccgtcctgaatgataacgactcgatgtttaatacgccgccgactttcgcctggtatctttccggtctggtgttcaaatggttgaaagcgcagggcggcgtggcggcgatgcacaaaatcaatcagcaaaaagcggagttgctgtacggtgtgattgataacagcgatttctaccgtaacgatgtcgcacaggccaaccgttcgcggatgaatgttccgttccagttagcggacaatacgctggacaaggtctttctggaagagtctttcgccgccggtctgcacgccttaaaagggcaccgtgttgttggcggtatgcgcgcctctatctataacgccatgccgattgaaggggtaaaagcgctgaccgatttcatgatcgattttgagcgtcgccacggctaatacgtttcttttttcatccccacggccagtctgtggggtttttatttctgttttttgagagttgagtttcatggaatccctgacgttacaacccatcgcgcgggtcgatggcgccattaatttacctggctccaaaagtgtttcaaaccgtgctttgctcctggcggctttagcttgtggtaaaaccgctctgacgaatctgctggatagcgatgacgtccgccatatgctcaatgccctgagcgcgttggggatcaattacaccctttctgccgatcgcacccgctgtgatatcacgggtaatggcggcgcattacgtgcgccaggcgctctggaactgtttctcggtaatgccggaaccgcgatgcgtccgttagcggcagcgctatgtctggggcaaaatgagatagtgttaaccggcgaaccgcgtatgaaagagcgtccgataggccatctggtcgattcgctgcgtcagggcggggcgaatattgattacctggagcaggaaaactatccgcccctgcgtctgcgcggcggttttaccggcggcgacattgaggttgatggtagcgtttccagccagttcctgaccgctctgctgatgacggcgccgctggcccctaaagacacaattattcgcgttaaaggcgaactggtatcaaaaccttacatcgatatcacgctaaatttaatgaaaacctttggcgtggagatagcgaaccaccactaccaacaatttgtcgtgaagggaggtcaacagtatcactctccaggtcgctatctggtcgagggcgatgcctcgtcagcgtcctattttctcgccgctggggcgataaaaggcggcacggtaaaagtgaccggaattggccgcaaaagtatgcagggcgatattcgttttgccgatgtgctggagaaaatgggcgcgaccattacctggggcgatgattttattgcctgcacgcgcggtgaattgcacgccatagatatggatatgaaccatattccggatgcggcgatgacgattgccaccacggcgctgtttgcgaaaggaaccacgacgttgcgcaatatttataactggcgagtgaaagaaaccgatcgcctgttcgcgatggcgaccgagctacgtaaagtgggcgctgaagtcgaagaagggcacgactatattcgtatcacgccgccggcgaagctccaacacgcggatattggcacgtacaacgaccaccgtatggcgatgtgcttctcactggtcgcactgtccgatacgccagttacgatcctggaccctaaatgtaccgcaaaaacgttccctgattatttcgaacaactggcgcgaatgagtacgcctgcctaagtcttctgttgcgccagtcgacgggctggcgcgccgagtccgtattcgcactatttttataattatgactaatgctaatttgttgatgatttaacacattgatttatgtgttttttataatagttatcaacggaagattagtatgaaaaataaatcattactactggcggtggcgatttccgccacgctactggcaggatgtaaaaatggcgtgaatggcaatttaatcgccagttcaggcatgtcaacctacaaagccgccacactgtccgatgcggatgttaaggcattatctaataatgcctgtaaacaaatggacagcgagaatcaactggcaggttcgaaaagcaaatacaccaaacgtctgagcaaaatcgccaaagcgctgggtaacaacattgacggtacgccggttagctataaagtctatatgaccagcgatatcaacgcatgggcgatggcgaacggttgcgttcgcgtatactccggcctgatggatctgatgaccgataatgaaattgaaggcgtactgggccatgaactgggccatgtctctttagggcactctcgcaaggcaatgcagaccgcttatgccacgctggcggctcgcgatgcgatttccgccaccagcggcgtcgcagcgcagctttcccagtctcaattgggcgatctggcggaaggcgtcatcaattcggcgttttctcgcagtcaggagtcggatgcggatgacttctcttacgatctgctgaaaaaacgcgggattaacacccagggcttagtcacggcattcgataaattcgccacaatggacgcaggtcatgcaaaatcattgatggactcccacccggcttcagccgatcgcgcgcagcatatgcgcgacagaattgccgaagataaaaagtaaatcattgtcatctttcgggctggtttctcgccggcccgctataattgcgcaattattccgcatctgattacagacaaaactggtttttgcacgcaacgttaacggtcgcgagcgttggcgcgtataatgcgcggcgtttacgttaacggtacgcctgtttaaggagataaagatgacggcaattgccccggtaataaccattgatggcccaagcggtgcaggtaaaggcaccttgtgcaaagcaatggcggaagcattgcaatggcatctgctggattccggcgcgatataccgcgtactggcgctggcggcattgcatcaccatgtcgatctcgcctctgaagatgcgctggtgccgctggcgtcccatctggacgtgcgtttcgtctcaacggacggcaacctggaagttatcctggaaggcgaggacgttagcggcgaaatccgtacgcaggaagtcgcgaacgcggcatcccaggtggcggcattcccacgcgtgcgtgaagcgcttcttcgccgccaacgcgcattccgcgaagcgcctggtttaatcgccgatggacgcgatatggggaccgtggtcttcccggatgcgccggtaaaaattttccttgacgcctcctcggaggaacgtgcgcatcgacgtatgctacagttgcaggagaatggctttagtgttaactttgaacgccttttggccgagatcaaggaacgcgacgatcgcgatcgtcatcgtgccgttgcgccgttagttcctgctgctgatgcattagttttggattctacccgattaagcattgagcaagtgattgaaaaagcgttacaatatgcgcgccaaaaattggctctcgcttaaatgcgaccgaatttgtagtacccccgttgcaaaggattgacagcgggtatgttaaacaaccccatccggcacggagccaggtggacgttaaatatgaaacctgaagattaaacatgactgaatcttttgctcaactctttgaagaatccttaaaagaaatcgaaacccgcccgggttccatcgttcgtggtgttgttgttgctatcgacaaagacgtagtactggttgacgccggtctgaaatctgagtctgccattccggctgagcagttcaaaaacgcccagggcgaactggaaatccaggttggtgacgaagttgacgttgctctggatgcagtagaagacggcttcggtgaaactctgctctctcgtgagaaagctaaacgtcacgaagcatggatcacgctggaaaaagcttacgaagatgctgaaactgttaccggtgttatcaacggcaaagttaagggtggcttcactgttgagctgaacggtattcgcgcgttcctgccaggttctctggtagacgttcgtccggtgcgtgatactctgcacctggaaggcaaagagcttgaattcaaagtaatcaagctggaccagaaacgtaacaacgttgtggtttctcgtcgtgccgttatcgaatccgaaaacagcgcagaacgcgatcagctgctggaaaacctgcaggaaggcatggaagttaaaggtatcgttaagaacctcactgactacggtgcattcgttgatctgggcggcgttgacggcctgctgcacatcactgatatggcctggaaacgcgttaagcatccgagcgaaatcgtgaacgttggcgacgaaatcaatgtgaaagtgctgaaattcgaccgcgagcgtacccgtgtatccctgggcctgaaacagctgggcgaagatccgtgggttgctatcgctaaacgttatccggaaggtaccaaactgaccggtcgcgtgaccaacctgaccgattacggctgcttcgttgaaatcgaagaaggcgttgaaggcctggttcacgtttccgaaatggactggaccaacaaaaacatccacccgtccaaagtggttaacgttggcgacgtagtggaagtgatggttctggatatcgacgaagaacgtcgtcgtatctccctgggtctgaagcagtgcaaatctaacccgtggcagcagttcgcagaaacccacaacaagggcgaccgcgttgaaggtaaaatcaagtctatcactgacttcggtatcttcatcggcctggacggcggcatcgacggcctggttcacctgtctgacatctcctggaacgttgcaggcgaagaagcagttcgtgaatacaaaaaaggcgacgaaatcgctgcagttgttctgcaggttgacgcagaacgtgaacgtatctccctgggcgttaaacagctcgcagaagatccgttcaacaactgggttgctctgaacaagaaaggcgctatcgtaaccggtaaagtcactgcagttgacgctaaaggcgcaaccgtagaactggccgacggcgttgaaggttacctgcgtgcttctgaagcatcccgtgaccgcgttgaagatgcgactctggttctgagcgttggcgacgacgttgaagctaaattcaccggcgttgatcgtaaaaaccgcgcaatcagcctgtctgttcgtgcgaaagacgaagctgacgagaaagatgccatcgcaactgttaacaaacaggaagatgcaaacttctctaacaacgcaatggctgaagcattcaaagcagctaaaggcgagtaatcctctgaaacttcgggtcttttagtccgaagtataacgagattacttgacagattgcaggtttcggcctgtaatcaagcactaagggcggctacggccgcccttaatcaatctcacggctgcagccaatttgcctttaaggaaccggaggaatcatgaccaagtcagaattgattgaaagacttgcaacccagcaatctcacattcccgctaaggcggttgaagacgcggtaaaagagatgctggagcatatggcctcgactcttgcgcagggcgagcgtattgaaatccgcggtttcggcagtttttctttgcattaccgcgcgcctcgtaccggacgtaaccccaagaccggcgataaagtggaactggaaggaaaatacgttcctcactttaaaccgggtaaagaactgcgcgatcgcgccaatatttacggttaagttttaacgcaaaacttgaacccgaaaaaagcaccgtcagggtgcttttttcatttatacgccgtcaggcgcaaacgctattcgaccgaaaactggaaaacgtttcgcattttttgctgcgtcttacatttatcaggtaaaaaacctggaatccgcgccgtatagcacaaaatcccctccagacaatggcgtcctgaacctgcacactttcccgcacagggaggtgtctatgaagataacgacggtcagcgtatgcgtagtatgcggcatacttccactcatgatattgccagtattacctgatacgtggattctcgcggtgctgttttgtctggcatgtttgctttgcctcataccccatcactatgcgcgctacgcggcattaactttgctctttttcatgtgggggatatttgccgccaggcaggccatctgggcgggaaacgtcctgcccgccgcgacgcaggaggcgacagtcgtcattactgccaccgatcatatgaccactcattatgggcgaatcacccatttgcgcggaaagccgctctttcctgctgtagggattgtcctgcatggccagtacttacccacggaagtgtgtgccgggcaacagtgggcgatgacgctgaaggtcagagcggtacacggacagcttaacgaaggcggttttgatagccagcgttacgcgctagcgcagcaccaaccgttgaccgggcgtttcctacaggctaaagcgattaatcctgagtgtagcttgcgtgggcgctatcttgcttcgcttcgcgctacgcttgcgccttatccgtggcagcaggttattctggcgttgggaatgggggagcggggagcggtgtcgcaggaggtgaaggccgttatgcgcgatacggggactgcccatttgatggcgatttccggcctgcatatcgcttttgctgcgttattggctgccggattaatccgtggcggacaattctttttgccggtcagatggattcgttggcagacgccattgctgggcggcattctttgcgcgatatgttatgcctggcttaccggcttacaaccgcctgcgctgcgcacggtggcggcgctgagcgtctggggaggattaaaattaagcggacgacagtggagcggctggcaagtctggtgctgctgtctggccgcgattattttcgccgatcctgtggcggttatatcacaaagtctttggctgtcagcatttgcggttgccggcctgttattctggtatcagtggtttcctgcgccaaacggaaattttccacgaggcttacgctggttgcttaacctgcttcacctacaggcaggcattacacttctgcttttgcctctccaggtggcgctttttcatggcataagcgttaccgcaatgctggcgaatctttttgccgtaccctgggtcacatttgtgacggttccactcatcctggcgggaatgattctgcatttaaccgggccgttttttcttgaagagtgggtatggtacctgaccgatcgcgcgttagccgcgctattttacctgttgaatgctttaccgcagggctgggtcaatattgataaccgttggcagtggctgacgcttttaccctggttaacgcttatcgcgtggcgattaaacgtctggcgtacctggccggcggtttgtttatgcgggttattgttgatgagctggccactctggcggccgataaacgccagcggatggcaggtgcatatgctggatgtcggtcaggggctggcgatagcgatcgtcaggggcgataaagtaatactctacgataccggtcgggcatggccggagggcgacagcgggcaacaggttattattccctggttgcgctggcataatctgacgccggagggcgttattttgagtcatgagcatctggatcatcggggtgggctgcgttcgctacagcaggtctggccgtcaatgtggattcgcagcccgttaggctggcagggacatttgccctgttttcgtggcgagcagtggcaatggcaggggctaacgtttcaggcgcactggccgttacgcgaaagtgccgatcgaggaaataaccgttcttgtgtggtcaaagtggatgacggtgtacatagcatcctgctcacgggcgatatcgaagcgggcgctgaacaaaaaatgctaagtcgttactggcgacatcttgcggcgacgtttatccaggtgccgcatcatggtagtaatacgtcgtcgtcgctaccatttattcagcgcgtacatggtgaagcggcgctggcgtccgcatcgcgctataacgcatggcggctgccgtcccgcaaggtaaaacagcgctaccgacagcaggcgtatcagtggtttgatacaccccaccaggggcaaatttcgctgcggttttctccgcagggctggcgcatacaaggcttacgggatcaaattttacctcgctggtatcatcagtggtttggcgtgtccgaggataacgggtagaatatgcggctatttcaacaaatgctggttttttgaatgcataacgataaagatctctctacgtggcagaccttccgccgactgtggccaaccatagcgccttttaaagcaggtctgatcgtggcgggcatagcgttaattctcaacgcagccagcgataccttcatgctatcgctcctcaagccattactggatgatggtttcggtaaaacggatcgctcagtgttgctgtggatgccgctggtggttattgggctgatgatattacgaggcatcactagctatatctccagctactgtatttcatgggtgtcaggcaaggtggtaatgaccatgcgccgtcgcctgtttggccatatgatgggaatgcccgtcgccttctttgataaacagtctaccggtacgctgctgtcgcgtattacatacgattcagaacaggttgcctcttcttcatctggcgcgctgattaccgtggtgcgtgaaggggcatcgatcatcggattgtttatcatgatgttctattacagctggcagttgtcgatcatcctggttgttttagcgccgattgtgtcgattgcgattcgcgttgtctcaaagcggttccgcagcatcagtaaaaatatgcagaacacgatgggacaagtgactaccagcgctgaacaaatgctgaaaggacacaaagaggtactgatttttggcggtcaggaagtcgaaactaaacgctttgataaagtcagcaataagatgcgactgcaaggcatgaaaatggtctctgcctcgtcaatttccgatcctatcattcagctcattgcctcgctggcgctggcgtttgtcctctatgctgcgagcttcccaagcgtaatggatagcctgacggcagggaccatcaccgtggtgttctcctccatgatcgcgctgatgcgtccattaaaatcgctgacaaacgttaacgcgcagttccagcgtgggatggcggcttgtcaaacgttgtttgcgattctggatagcgaacaggagaaagatgaaggtaaacgtgtcattgaccgcgcgaccggcgatctcgaattccgcaatgtgacgtttacttacccgggccgtgaagtgccggcattgcgtaacatcaatttgaaaattcctgccgggaaaaccgtggcgctggtggggcgttccggatcgggtaaatcaactatcgccagtctgatcacccgtttctacgatattgatgaagggcacatcctgatggatggtcacgatctacgcgaatacactctggcctctctacgtaatcaggtggcgctggtttcgcaaaacgtgcatctgtttaacgacacggtcgccaataacattgcttatgcccggacggaagaatacagccgcgagcagattgaagaggcggcgcgcatggcctatgccatggactttatcaataagatggataatggcctggataccatcatcggcgaaaacggcgtactgctttccggcggtcagcgccagcgtatcgcgatcgcccgcgccttactgcgcgacagcccgattctgatccttgatgaagctacgtccgcgctggataccgaatctgaacgtgcgattcaggcagcgttggatgagctgcagaaaaaccgtacctctctggtgattgcgcaccgtctctccaccatcgaacaggcggatgagatcgttgtagtcgaagacggtattatcgttgagcgcggcactcatagcgagctgctggcgcaacacggcgtttacgcccagctacataagatgcaatttggccaatgattgcgcgtatctggtcgggtgaatccccgctatggcggttactgctgccgctctcctggctgtatggcttggtgagcggggcgattcgtctgagctataagcttggttttaaacgcgcctggcgagcgccggtaccggtggttgtggtagggaatcttacggctggcggtaacggtaaaacccccgtagtcatttggctggtggaaaagctgcaacagcgtggcgtgcgcgtgggggtcgtttcccgcggctacggcgggaaagctgccgcttatccgctgctcctgacgccggagacgacaaccgcagaagcgggagatgaaccggtattgatttatcaacggaccggcgcgcctgtcgcggtagcgcctgaacgcgccgcggcggtgaaagcgattctggcagcgcataatgtgcagattattatcaccgacgatgggttgcagcattaccgactcgcgcgagatattgaaattgtggtgattgacggcgtgcgccgttttggcaacggctggtggcttcctgccggtcctatgcgcgaacgcgccagtcgcctgaaaaccgtagacgccgctatcgtgaatggcggcgtcgcccgggcgggcgaaatccccatgcagctagcgcctggactggcggtgaacttacgtacgggagcgcgttgcgatgtggcgcaactgagcaatattgtggcgatggcgggcatcggtcatccgccgcgctttttcgccacgctggaagcctgtggcgcgcatccgcaaaagtgcgtcccgctggccgatcatcaaacgctcgcccctgctgacgttcaggcgttggtcggtgaagggcagaccctggtaatgacggaaaaagacgcggtgaaatgccgtgcttttgccgaagataactggtggttcttaccggttgatgcgcgtttgtccggtgagcagcctgataagttgcttcaacatatcacctcgctggttcgctagcgtcccccaatgcagcggcagtgatgaatttatggagtcatgaatgtcattgccgtacctttctctttcccaggcccgttgtcttcaccttgctgcgcaggggctattgaaaaagccgcgccgtaacgcgctgcctggcgatgttcttgccgccatctcacgcatggcgttgctgcaaattgataccatcaatgttgtcgcacgtagcccctatctggtgctgtttagccgtctcggctcgtacccgcaggcctggctggatgaggcgctgcgacgcggcgagttaatggaatactgggcgcatgaggcctgtttcttaccacgccgtgactttaaacttatccgccatcgtatgctgtcgccggaaaagatgggctggaaatatcacgcggcatggatgcatgagcacgcggaagaaatagaacagctggtgcggcatattcaggagcacggtccggtgcgttctgccgattttgaacatgcgcagaaaggtgccagcggctggtgggaatggaaaccacataaacgccaccttgagggtttatttaccgccggaaaagtcatggttgttgagcggcgtaattttcaacgtgtatatgatttaacgccccgtgtgatgccgcactgggatgatgaacgcgatggactgtcacagtcgcaggcggaaaacctgatgctggataatagcgcgcgcagtctggggattttccgtgaacagtggctggcggattactaccgcctgaaacgtcctgacctgaagggatggcgggagagccgggcggaacagcagcagattattccggtcgaggtggaaacgttggggcggatgtggcttcatgccgatcttctttcgcagctggaaccggcgctgaataacgccttaaaggcgacccatagcgcagtactgtcgcctttcgatcctgtggtatgggatcgcaagcgggcaacgcagcttttcggatttaactatcggctggaatgttatacgcctgcggcgaagcgccagtacggttattttgtgctgccgctattatacctgggccgtttagtcgggcgaatggatgccaaaatgcaccgtaaaacgggggtgcttgaggttatctcgctgtatctggaggacgatattcgccctggcgttagtctgcaaaaaggaatctggcaggcgattagcgcgtttgctgcctggcaacgggcatcgcgcgtgacgctgggacaatgtccgccaggcctgtttagcaccatgcgtcatggctgggaaatagaccctgcaccctaaccgattatgttaatattgaaggattcacaatccggtccatctggaggaactatggatcatcgtctgcttgaaatcatcgcctgcccggtatgtaacggcaaactctggtataaccaggaacagcaagaattaatttgcaaactggacaatctcgctttcccgttacgcgacggcattcctgtattgctggaaaatgaagctcgcgccctgacatctgatgagagtaaatcatgagtttcgtcgtcatcattccggcccgtttttcatctacccgactgccaggcaaaccattagtggatattaatggtaagcccatgattgttcatgtcctggagcgggcgcgcgaatctggcgcggaacgcattattgtcgcgaccgatcatgaagacgtggctcgtgcggtagaagcggctggcggcgaagtgtgcatgacgcgcgccgatcaccagtccggcaccgaacggttggcggaagtggtagagaagtgcggattcagcgacgataccgttattgtgaacgttcagggcgatgagccgatgatcccggcggttattattcgccaggtcgcggaaaatctggcgcagcgccaggttggcatggcgacgctggcggtgccgattcacagcgccgaagaagcgtttaacccgaatgcggtaaaagtcgtgctggatgctgaaggctatgcgctttacttttcccgggcgacgattccctgggatcgcgatcgctttgcaaaaagtctggaaacggtaggggatacttgccttcgtcacctgggcatttatggctatcgcgcggggtttatccgccgttacgtgagctggcaacccagcccgctggaacatattgaaatgctggagcaactccgtgtgctgtggtacggcgaaaaaattcatgtcgccgtcgccaaagcggtgcccggcacgggcgtagacaccgccgacgacctggagcgcgtgcgcgctgaaatgcgttaacatgatcctgttcatgatcgtcttagacggtcatgaacagcgcggtatgatagcgcaaagatgaatactcacgtctgctcatcagtggcggctttctcgtaccgttacgattttcctcatttttcttttcttcccttgatctgatacgggtgacatctgtccatacgacgctcattattaaagcagtagcactaatgggggtaatctggaatggaacagttgcgggccgaactcagtcatttgttgggtgaaaaacttagccgtatagagtgcgtgaatgagaaagcggattccgcattgtggtcattatatgacagccagggcattccgatgccgctgatggcgcgaagttttaccactcccggcgttgcgcagcaactggcatggaaaacctcaatgctggcgcgtagcggtacggtgaggatgccggtaatctatggcgtattgacgcatgaagagcatcctggtccggatgtgctgctgctggaacggctgcgcggtgtgccggtcgaggcgccggcgcgcactccggaacgctgggaacagctaaaagatcagattgtcgaagggctgttagcctggcatcggcaggatagccgcggttgcgttggcgccgtagaccatactcaggagaatatctggccttcctggtatcgtcagcgggtggaggtgctgtggacgacgctaaatcagttcagcaataccggcctgacgatgcaggacagacgcattctgtttcgtaccagagaatgtcttccttcgttatttgaagggtttaacgataactgcgtactggtgcatggcaacttctgcctgcgcagtatgcttaaagacgcccgtagcgatcagcttctggcgatggtcggccccgggctgatgctgtgggcgccgagagagttcgaactgtttcgcctgatggataatccattggcggagggattgctttggcattatctgcaacgcgcgccagtggcggagtccttcatctggcggcgttggctctatgtgctgtgggacgaggttgcgcaattggtcaataccggacgttttaaccgtaccaattttgatcttgcggcgaaatcattactcccctggcttgcctgatatgcctttcagccattgccaaagtcgccctaatgtttcatacccagcgcgatcgctgtgcatcagccagaccggggacggaattgcccgctcccagggattgagcggcgaatcgatcgccaactgattcgccggcgcgggaagcggattcagcccggcatgctgaaagaaaatcatcgcacgcggcaaatgcgaggcggaggttaccaacaggaaaggggcgtcgccgatggcctgcttaacggcggcggcttcttcttccgtatcttttggcttatccagcgtaataatatcgctacgcggtacgcccagtgactgcgccacccgcgcaccgacttccgccgtgcttaccgtattggtttttgctacgccgccggtaaaaatcagcctggctcccggattcgcgcgccacagccgaatgccttccgccagccgcggcaagctgttgttaattaaattagagctcggcgcccactgcgggttccaagtatagccgccgccgagaaccacaatatattccaccttttgcggaccctgccaggtagggtagcggttttctatcggacgcagcagatggtcagagacgggttgcaggcttaatagcaatagcgccagccaacctacgctgataaatacttttccggtcttctgaaagcggctaaaccagagcagcgccaggccgacgccaatcatcagcaacatcagcggaagcggcaataacataccgccaatcactttctttagcgtaaaaagcatcctttttggttccttttttaaccatatagcggaggattaacggtgatattacaccagacaggttcattctggccgcggctgtgacaaaatagcggttttatcagataacgcctgagccagcctgtggagagtccgatgcaggatcgcaattttgatgacattgctgaaaagttttcccgtaacatttacggcacgaccaaaggacaactgcggcaagccattctgtggcaagacctggatcgcgtgctggaggagattggcgggcggaaactgcgggtgctggatgccggcggcggcgaagggcaaacggcgattaagatggcggaacgcggccatcaggtgacgttatgcgatctgtctggcgaaatgatcgcccgcgcgcggcaggcggccgaggcaaaaggtgtgagcaaagacatgcattttatacaatgcccggctcaggacgtcgcttcgcatttggaaagcccggttgatctgatattgtttcatgctgtgctggagtgggtagccgatcctgtcggcgtattagaaacgctctggtcagtattgcgccctggcggcgcgctgtcgttgatgttctataacgctaacggtttgctgatgcacaatatggtggcgggtaattttgactacgtgcaggcggggatgcctaaacgcaagaagcgcacgctgtcgcctgactacccgcgcgaccccgcgcaggtgtaccagtggctggaggcgattggctggcagattaccggtaaaaccggcgtgcgtgtgtttcatgattatctgcgtgaaaaacaccagcagcgtgactgttatgagaccctggtcgaactggaaacgcgttattgccgccaggagccgtatattagccttgggcgctacattcatgtcaccgcgattaaaagcccggcgctagccgcagatgcaaggataacctatgagtgaattttcccagacagtccccgaactggttgcctgggccagaaaaaacgacttttccatctcgctgccggtagacagactttcctttctgctggcggtcgccacgttgaacggcgaacgccttgacggcgagatgagtgaaggcgagctggtggatgcattccgccatgtgagtgatgcgtttgagcaaaccagcgaaaccatcggcgtgcgcgctaataacgcgattaacgatatggtgcgtcaacgtctgctgaaccgctttaccagcgagcaggctgaaggcaatgcgatttaccgattaaccccgctcgggattggcatcaccgattactacattcgtcaacgcgaattctctacgctgcgtctttctatgcagttgtcgattgtggccggcgaattgaagcgcgcggcggatgcggcagcggaggggggcgatgagttccactggcatcgcaatgtttacgcgccattgaaatattcggtggcggagattttcgacagtatcgatctcacccagcgcatcatggatgaacagcagcagcaggtgaaagacgatatcgcacaactgctgaataaagactggcgggcggcgatttccagctgtgaactgctgctttccgaaacgtccggtacgctgcgcgagttgcaggatacgctggaggcggcgggcgataagctgcaggctaacctgctgcgcattcaggatgccacgatgacgcacgacgatctgcattttgtcgacaggctggtgtttgacttacaaagtaaactcgaccgcattatcagttggggtcagcagtctattgatttatggatcggctacgatcgtcacgtgcataaatttatccgtaccgcgatcgatatggataaaaaccgtgtcttcgcccagcggttgcgccagtccgtgcagacttattttgacgatccctgggcgctaacctatgcgaatgccgatcgtctgctggatatgcgcgatgaagagatggcgttgcgtgacgatgaagtcaccggggagttgccgccggatctggaatatgaagagtttaacgagatccgcgagcagttagcggccatcattgaagaacagctggctatctacaaaaccagacaaacgccactggatcttgggctggtggtgcgcgagtatctggcgcaatacccgcgcgcgcgtcatttcgacgtggcgcgtattgttatcgatcaagcggtacgtcttggcgtagcgcaagcagatttcaccggactgccagccaaatggcagccgattaatgattacggagccaaggtacaggcgcatgtcattgacaaatattgaacaagtgatgccggttaagctggcgcaggcgctggcgaatccgttatttccggcgctggatagcgcattacgttcgggccgccacatcgggctggacgaactggataatcatgcctttctgatggattttcaggaatacctggaagagttttacgcgcgttataacgtggagttgattcgcgcgccggaggggttcttctacctgcgtccgcgttctaccacgcttattccgcgctcggtgttatccgaactggatatgatggtcggtaaaattctctgctacctctatcttagcccggagcgtctggccaacgaagggatctttactcagcaggagttgtacgacgagctgcttacccttgcggacgaagccaaactgctaaagctggtgaataaccgctcgacgggatctgacgttgatcgtcagaaactgcaggaaaaggtgcgttcttctttaaaccgcctgcgtcgtttgggcatggtatggtttatgggccacgacagcagcaaattccgcattaccgaatcggtcttccgctttggcgcggatgtccgtgccggcgacgatcctcgcgaggcgcagcgtcgtctcatccgcgacggggaagcgatgcccattgaaaaccatctgcaacttaatgatgagaccgaagagagtcagccggacagtggagaggaagaataatgattgaacgcggtaaatttcgctcgctaacgctgattaactggaacggtttttttgcccgcacttttgacctggatgaactggtcacgacgttatccgggggcaacggcgccgggaaatccacgacgatggcggcgttcgtcacggcgctgatcccggatctcacattactgcactttcgtaacaccacggaagccggcgccaccagcggttcgcgcgataaaggtctgcacggtaagctgaaggcgggtgtctgttactccatgctcgacaccattaattcccgccatcagcgggtggtggtcggcgtgcgtctgcagcaggtcgctgggcgcgatcgcaaagtggacatcaaaccgttcgctattcaggggctgccgatgtcggtacagccgacacaactggtgacggagacattaaacgaacgtcaggcgcgcgtactgtcgcttgctgagctgaaagacaagcttgacgagatggaaggcgtgcagtttaagcagtttaactccatcaccgattatcattcgctgatgtttgacttagggattatcgcccgtcgtctgcgctccgcttccgatcgtagtaaattctatcgcttgatagaggcctcgctgtacggcgggatctccagcgccattacccggtcgctacgcgattatttattgccggaaaacagcggcgtgcgcaaggcgttccaggatatggaagcggcgctgcgcgagaaccgactcacgctggaagcgattcgtgttacccaatccgatcgcgatttgtttaagcatttgatcagcgaagccaccgattatgtggcggcggattatatgcgccacgccaatgagcgtcgggttcaccttgatcaggcgttggcgtttcgacgcgatctgtacacatcgcgcaaacagctggcggcggagcagtacaagcacgtcgatatggcccgtgagttgggcgaacataacggcgccgaaggttctcttgaggcggattaccaggcggcgagcgatcacctgaatctggtacaaaccgcgctgcgccagcaggaaaaaattgaacgctacgaagcggatcttgaagagctgcagattcgactcgaagagcaaaacgaagtggtggcggaagccgccgaaatgcaggacgaaaatgaagcgcgtgccgaagccgccgagctggaagtcgatgaactcaaaagccagcttgcggattaccagcaggcgctggatgtacagcaaacgcgcgcgattcagtataaccaggcgatatcagcgctcgcccgcgctaaagaactttgccatctgccggatctaacgccggaaagcgccgccgaatggctggatactttccaggcaaaagagcaggaagctacggaaaaactgctgtcgttggaacaaaaaatgagcgtggcgcaaaccgcgcacagtcagtttgagcaggcttatcagctggtagcggcgatcaacggcccgctggcgcgtagcgaagcctgggacgtggcgcgcgagctgttacgggacggcgtgaaccagcgtcatctggcggaacaggtacagccgttgcggatgcgcctgagcgaactggaacagcgactgcgcgagcagcaagaggcggaacgtctgctggcggagttctgtaagcgacagggcaaaaattttgatattgacgaactggaagcgttgcatcaggagctggaagcccgcatcgcgtccttgtctgagagcgtgtcgtcagccagcgaacagcgtatggccttgcgtcaggaacaggaacagctgcaatcccgtatccagcatctgatgcaacgcgctcctgtctggctggcggcgcagaatagcctgaaccagcttagcgaacagtgcggcgaggagtttacgtccagccaggaagtgaccgaatacctgcaacagctactggagcgtgagcgcgaagccattgtcgaacgcgacgaagtgggcgcgcgtaaaaatgcggttgatgaagagatcgaacgtttaagccagccgggcggcgcggaagaccagcgtttgaatgcgctggcggagcgttttggcggggtactgctgtcggaaatctacgatgatgtcagccttgaagatgcgccgtacttttccgcactgtatggtccgtcgcgccatgcgatcgtcgtaccggatttatcgcaaatagccgaacagcttgaaggtctgaccgactgcccggaagatctgtacctgatcgaaggcgatccgcagtcttttgatgacagcgtattcagcgttgacgagctggaaaaggcggtggtcgtgaaaattgccgaccgtcagtggcgttattcgcgttttccgtcgctgcctatttttggccgtgcggcgcgcgagaaccgtattgaaagtctccatgcggaacgggaagtgctttccgagcgctttgccacgctctcgtttgacgtgcagaaaacccagcgtttgcaccaggcgttcagccgttttatcggtagccacctttctgttgcctttgaggacgatccggaagcggaaattcgccgactgaacgggcgtcgcgtcgagctggagcgcgcgctggcgacgcatgaaagcgacaaccagcagcagcgccttcagtttgagcaggccaaagagggcgtttccgcgcttaaccgtttgctgccgcggctgaatttattggccgatgaaacgctggccgatcgggtcgatgaaattcaggagcggttggatgaggcgcaggaagcggcgcgatttgtgcagcaatatggaaaccagttagccaaactggagccagtagtttccgttctgcaaagcgatccggaacagtttgagcaattaaaagaagactatgcatggtcgcagcaaatgcagcgcgacgcgcgccagcaggcttttgctctggctgaagttgtcgaacgtcgggcgcatttcagctattccgactcggcggaaatgctgagcggcaacagcgatctcaacgaaaagctgcgccagcggctggagcaggcggaagccgagcgtacccgcgcccgcgaagcgctgcgcagccatgccgcgcagttaagtcagtacagccaggttctggcctcgctaaaaagctcttacgacacgaaaaaagagctgcttaacgatttgcagcgcgaattacaggatattggcgttcgcgccgacagcggggcggaagagcgcgcccgccagcgtcgcgatgaactgcacgcccagttgagcaataaccgttcgcgtcgcaatcagcttgagaaagcgctcaccttctgcgaagcggagatggagaacctgacccgtaagctgcgcaagctggagcgcgattatcatgaaatgcgcgagcaggttgtgaccgcgaaagccggctggtgcgcagtcatgcggatggtgaaagacaatggcgtggaacgccgtctgcaccgtcgtgagctggcttatctgtcggcggatgaactgcgctccatgtcggataaggcgttgggcgcgctgcgcctggccgtcgcggataacgaacatctgcgcgacgtattgcgtctgtcggaagatccgaaacgcccggaacgtaaaatccagttctttgtggccgtttaccagcatctgcgcgaacgtattcgtcaggatattattcgtaccgacgatccggttgaagccattgaacaaatggagattgaactgagccgtctgacggaagagctgacatcgcgtgagcaaaagctggcgatcagttcccgcagcgtggcaaacatcatccgcaagactatccagcgtgaacagaaccgtatccgtatgctgaaccaggggttgcaaagcgtctcttttggccaggtgaatagcgtgcggttaaacgtcaacgtgcgtgaaacgcatgccaccttgctggatgtgctttcagaacagcaggagcagcaccaggatctgtttaacagcaatcgtctgaccttctccgaagcgctggcgaaactgtaccagcgtctgaatccgcagatcgatatggggcaacgcacgccgcagaccatcggcgaggagctgctggactaccgtaactatctggaaatggaagttgaagttaaccgtgggtccgacggctggctgcgtgcggaatccggcgcgctatcaacgggggaagctatcgggaccgggatgtcaattctggtgatggtggtgcaaagctgggaagacgaagcgcgcagactgcgcgggaaagatatttcgccatgtcgcctgctgttcctcgatgaagcggcgcgtctggatgcgcgctctatcgccacgctgtttgaactatgcgaacgtttgcagatgcagctcatcatcgctgcgccggaaaacatcagtccggagaagggcacgacgtataaactggtgcgtaaagtgtttcagaatactgagcatgttcatgttgtcgggctgcgtggctttgcgccgcagcttccggaaacgcttcccggtacgcagacggaagatacgccttcagaagcgagttaaatacggcagaaacgatgacgtgcctgatggcgcctcgtttatcaggcaaggccggataagtcggttacgccgccatccggcacaacaagttctgttttatcattagcctggggcggcgaaagccgcctttttctttatctgaaaaatctctccgggtagtgcattttctttaaacttctttacattaggttaggcaaaaacgtaacgaactttatatactggagttaagcctgacgagtgagcaggctgactcgtcatactaaacaaaagcattggttgcggttgacccgcgctgcgggcagcgcagtcatgcggagtatgataacgaaaacagggggcaagggatgttgcttaataagatgtgtggtcgttgtctgtcggcaatcagtttatgcctggccgtaacattcgctccactgttcaatgcgcaggccgatgagcctgaaatgatacctggcgatagcgccgttgccgcgacggatctggctgggccgcagaagcaatcagccgcgacggcgattatggccgggattcagccgctgccggagggcgtttcagccgagaaagtccgggctgatttacagtcgcagcttccttccggctatacgccggtctatatgagccagctgacattgctgtatgccgcgcgcgacatgaagcccatgtgggataatcgcgatgcggtgaaagccttccagcaacagttggcggaggtggcgattgccggattccagccgcagtttaccgcctgggtggcattgttgaccgatcccgccgtaaacggtatggcgcgcgatgttgtgttgtcagacgccatgatgggctatctccatttcattgcgaatatccccgtcaaaggccagcgctggttatatagcaacaaaccttacgcattggcgacgccgccagtctcggtgattaaccagtggcaaatcgcgctggaagagggccagttgccgatgtttgtcgccagcctggcgccgcagcacccacagtatgcgcccatgcatgatgcgctgctgaagctggtggcggactctcgcccgtggccgcagttgaccaataccgcgacgctgcgcccggggcaatggagtaacgatgtgcctgcgctgcgcgaaatattacagcgtacggggatgctggatggcggtccaaagatagccttacccggcgataacactgctgatagcgccgtcgtcagcccctccgccgtggtcgacgaaacatcggtggcgcacgacgaaccaacggcccgccgtagtaagccggctccggcggcacgcgcctacgatcgtgaactggtcgaggcggtaaagcgttttcaggcatggcaagggctgggggcggatggcgttattggcccggcgacgcgtaactggcttaatatgacccccgcgcaacgcgcaggcgtactggcactgaatatccaacgtttacgcctgctgccagcggaactctctaccggtattatggtaaacattcccgcttattcgctggtctactatcagaatggcaaccaggtgctggcttcaagggtgatcgtcgggcgtcccgatcgtaaaacgccgatgatgagcagcgcgctgaataatgtggtggtgaacccgccgtggaacgttccgcccacgcttgcgcgtaaagacattttaccgaaggtgtggaatgacccaggctatctggagcgccatggctacaccgtgatgcgcggctggaacagcaaagaagcgatcgatccgtggcaggttgactgggccaccattacgccatcgaatcttccgttccgtttccagcaggcgccaggcgcgcacaattcgctggggcgttataaatttaatatgccgagttcagatgcgatctatctgcacgatacgcctaaccatactctctttcagcgtgacgccagggcgttaagttccggctgcgtgcgggtcaataaggcctctgagctggcgaatatgctcttgcaggatgctggctggaacgatgcgcggatctcaggcgccctgaagcaaggcgacacgcggtatgtcaatatccggcagaacattccagtaaatctttactatctgaccgcatttgtcggcgcagatggacgtatgcaatatcgtacagatatttacaattacgatctcacagcgcgatccagcgcacaaattgtgccaaaggttgaacaattaatcaggtaaatgaagaagttctggtaaatatgttgtcctaatgtttggcttcaacggggcgtttcgctgtagacccccgttgtggctgggggagggccatcttgacgcgggctttatcggcagttaaggtgcctttcgtgcgccagaagtgcatatacaacaacctttaagtcgaccgggccgttcagaagtctgtgccagccggtatcatgtctgcttaaaggtagaagtgtattaacgataacattgacctgtagacctgattatcatggacaaatttgacgctaatcgccgcaagctgctggcgcttggtggtgtcgctctcggcgccgccatcctgcccgcgccagcgtttgccacactctcgaccccacgcccgcgcattttgacgttaaacaatctccataccggagagtcaatcaaggcggagtttttcgatggaagagcctacattcaggatgaattagcaaagttaaaccattttttccgtgactatcgcgcgaataaagtccgatcaatcgatccccgcctgtttgaccaactttaccgacttcaggggctgttagggacgcgtaaacctgtgcagctcatctcaggctaccgttctcttgataccaataatgaattacgcgcccgtagcagcggcgtagcgaaaaaaagctaccatacaaaagggcaggcgatggattttcatattgaaggcgtggcgctgagcaatattcgcaaagcggcgttatctatgcgcgcaggtggtgtaggatattacccacgtagtaactttgtgcatattgataccgggccggcgcggcactggtaatcagcgaggcttaatcaaaggagcagtatgaactatcgtattattccggtcaccgcgttctcccagaactgttcattaatctggtgcgaacaaacccggctggcggcgctggtcgatccgggcggcgacgcggaaaaaattaaacaggaagtggacgccagcggcgtgacgttgatgcaaattttactcacgcatgggcatctcgatcatgtcggcgcggcgagtgaactggcgcagcattacggcgttcctgttatcggtccggaaaaagaagatgagttctggctgcaaggactgccggcgcaaagtcgcatgtttggtctggatgagtgtcagccgctgacgcctgatcgctggctgaacgacggcgatcgcgtcagcgtagggaatgtgacgttacaggtgttacattgtccgggacacacgccgggacacgtggttttctttgatgaacagtcgcaactgctgatctccggcgatgtgattttcaaaggtggcgtcgggcgcagcgattttcctcgcggcgatcacacccagttgattgacgccattaagcgtaaattattgccgcttggcgatgatgtgacctttattcctggccacggcccgctctctacgctcgggtacgagcgtctgcataatcccttcttgcaagatgagatgccggtctggtaagcagaatgaaaaagcctgcacattgcaggcttttttatcggtcacgccagtcggcagctttttacagtaccgcgacaatggcttcgcacagcggcgccatattatccggggtcatgcccgccacgttcacgcgaccagaagccacggcataaacgccgaactcttcacgcagacgcagcacctgatctttggtcagaccgctgaatgagaacatcccgttctgcttgataataaagctgaagtcacggttcgcgcctttttcctgcaaggtattcacgaacagttgacgcatacgctgaatacgctggcgcatgtccgtcagttcctgttcccagatagcgcgcagggcgtcattactcaggatagtcgcgacgatggacgcgccgtgcgctggcgggttggagtagttagcgcgaatggcggatttcatctggctaaaagcgcgatccacggtttccgcatcggcggcaacgagggtgcaggcgccgacgcgctcattatataagccgaagtttttggagtaggagctggcgacaataagctctttatgcagcgcggcaaaggcgcgcagaccttccgcatcttcttccaggccgcgggcaaagccctggtaagcgaaatcgaatagcggcagccaccctttttcaacggaaagctcagccagaacctgccactgttccagagtagggtcaatgccggttgggttatgacagcaaccgtggaacagaaccacatcgccggcctgtgcttcgctcaggctggcttgtagcgcttcaaaatccagcgtgtgattttccgcatcgtagtaagcgtactcccgaacttccaggccggcagcgttaaacacgcttttgtggttcggccagctggggttgctcacccacacccgttttaccggagtattttttgccaaaaagtcggcggcaatgcgtaacgcgccggtaccgcccggcgtttgcgccgtgcgtgcgcgcttatcgttaatcagcgcgctgcctttgccgaacagcagttcctgagtgcagcgagcaaattccggaatcccgtcaatgccgagatagtttttcgtcgtttcattttccagtaaatactgctcggcttttttaacgctggtgagcaccggtgttttgccggtttcatctttatatacgccaatgccaaggttaattttccctggacggtcatcggcgcgaaacagatcggccaggcccaaaatcgggtcggcaggagcggcggttatgttctcaaacatgacgaggttccattatagttacagaagggaaatccgctatcaggttaacggcagatttacaaaatgccaaccgttagcgctaaaaagcccgcctgtttttgaaagacgcacattttctctaagagagataaaaaaacaggaccgaagtcctgtttttgaggcataaaacaaaggggtctgctgatcagaactggtaagtaataccgacagccgcctgatcgtcggtgccaacgtagctggagctgtagtcgttttcgtccagcaggttgaaacggtagtcaacccatacgttcatgtttttgttgaagtagtaagtcgcgcccgcctgaatatatttcgccagatcggccgagccgccggcgccgttcaactgcttacctttactctgcacatacgagattgccggacgcaggccgaagtcaaactggtactgagcgaccacttccaggttctgcgttttgtttgccatttccacggtatcggtaaccgtattttcaacaatgctcatattgcgggtttcagcatatacggcagccaggtagacgttgtttgcatcatatttcgcgccaacggcccacgattctgcgcgatcgccattaccatcgcgatcctgctgatcgttagtacgcttgctgttgctgtacgctgcggtgacgccaaagccgtcgaactcatatgccatggtgtaacctacgccatcgccattctgagagttaatgctgtggttgtcctgatttttaccctgatactggataccgaaagagagaccgtccaccagaccaaagaagtcagagttacggtaggtcaacaaaccgccagcacggctggtcatgtagttatcagtataggcgccgccccaggtttcgccggagaagtagggggccatatcggtataggattcaacatcataaacgataccgtagttacgaccataatcgattgaacccacttccgcgtatttcaaacccgcgaaagccagacggaccagattcgagttctgctgttcgccttcagcgcggtctgctttagtacggtattcccactgaccgaaaccggtcagatcggtgttaatctgcgtttcccctttaaaaccaatctgggcataagtctggtcggcatttttactatcgccggtcgttgtccatacgtgacgacccacggctttaccgtacagatccagcttattaccatctttattataaatttctgctgcgtttgcggttgcagcagccagcagggcagggatcaccgctgccaggattttgcgcttcatcattatttattaccctcattggtttttttatatgacacctgccactgccgtcaataaattccgtcaataaaactttacagaaatattgatgagagtttggtgtctttatgtgtctgacaggcatctttccattcaaactaacgtttcgctaccgtgaaagtgctacaaagataaagatttggtttcaaaaggaaataatatgtaaacaaatgttatttttacagaactttgtgaacaacgtcaaacttcccctgagttatcgttttgatttgatcgtttttcttttatatccatgattttattgaatttatttgttcgcgacaccgttgtgcctgaaaaagcagctgacgagctatttcataaaaatagccatttagaagtctggatgtctgaaattgtggtgaaaaattgtgctattagagcagaaaaatctaatccgcaataaaattaagggttaatttttatgtgtaaatattttcgtgaaatatacagtaacaagatgtggtaattcagagggttgtaattaattttatttacttattgataataaaactgacattcaggcgaaaaaaaaggccagcatagctggccttgagtgtgacgtaaaaatcagaagctggcgttgcgtggggtccgtgggaacggaataacatcgcgcacgttttgcacaccagtgacgtaagcgataaggcgttcaaagcccaggccaaagccggaatgcggtacagtaccgtagcgacgcaagtcgcgataccaccagtaatcctctttattcagccccatttcggccatacgggcatccagcacatccagacgctcttcacgctgggaaccaccgatgatttcgccgattcccggcgccagcacatccatggccgccacggttttgccatcttcgttaaggcgcatgtaaaacgctttaatttctttcggatagtttttcaccactaccggcgctttgaaatgctcttccgccagataacgttcgtgttcggaagagaggtcgacgccccagaacaccgggttttcaaatgtcttaccacagcgttccagaatggcgaccgcatcggtgtaatccacctgagcgaagtcggtagagacaaaacgctccagacgagcgatagcgtctttatccacgcgttcggcaaagaacttcatgtcatccgcacgctcttccagaaccgcgttgaagacatatttcagcatggcttccgccagacgggcgttgtcttccagatcggcgaatgccacttccggctccagcatccagaactccgccaggtggcggctggtgttggaattttccgcgcggaaggtcggcccaaaagtatagattttggacagcgcgcaggcataggtttcaccgttgagctggccggagacggtcaggaatgattctttgccaaaaaagtctttgtcaaaatctactctgccctggtcgttacgcggcaggttttccagatccaacgttgagacgcggaacatttcgccagcgccttcggtatcggaagcggtaatcagcggggtagagacccaaaagaaaccctgctcatcgaagaagcgatgcagcgcctgcgccagagtatggcggacgcgcgctaccgcgccaatcaggttggtgcgcgggcgcagatgcgcgacttcacgcagatactcaatgctatggcgttttgccgccatcgggtaggtatccggatcttccacccagcctgcgacttctactttcgtggcctggatttcgaaactttgcccctgtcccggcgacgcgacaaccttacctgttactaccacggagcagcctgtcgtcaggtgtaatacttcttcattataattgggcagagaattattaatgacagcctgtacaggatcaaagcaggagccgtcataaacggcgaggaaggagatgccagcttttgaatctcggcgggtacgcacccatccgcgcacggtgacttcttggtcaacggctacgcggccctggagtacgtcggctacaggcacaacgctcataatattctctctagttaatagtcggaaaaaataaacacttgtccacccgaaatgggggtattcctatgttacctggcatctgcaatcagacaagcagaaatcgcatctggaagcaggttttcagaaagaaacctgtaaaaagttcgcacctgctcgcgaaccattgagaatttaggctggttttgcaagctttgcgcacgttactcgatcaggacgcgcatctcttgcttggcgttttgcatcacgacaatcgttttaaaagactttatattgcctgaggaaaagaaaagctcacgggtaagcgcttcatattccgccatgtcacgaacattgagcaccagtaaaaagtcgaaatcgcccgttacgtagtagacctgctgcacctgcgggcaactgacaaaccgttgacgagcctcttccagtaaattgaatcgctcgttttcgatcaccacctgcaccacaatcgtgaccgggcgtcccactttgccagcatcaataaggctgacattgcctttaattatgcccgcctcctccagtgccgcgatacgacgattcactgccgaaggtgaaagattgacctgttcggcgatttcccgctgagaaagacgattatcgcgctgcaataatgtcagaatgtttttatcccaggcgtcaagcttcatatcgcaaataacctctttaatgtgatgactatcactgtgcgcaattttgccgcgtccaggccgttaaaaaaaggtgaaaattgcacgacgatgggcattttcgcgccatttaacagcaataagcatagtactatcataatcagcggaataaagaaaaggacgtaatagatattgtgcgactcttttatcagtacgtttattaaagtgaggataaccactactacagccacaaaacgcgagttctttgcttgtttctactcaataattgacaaaaatatattatttcaataaataaactttaacaaaaggtatcattatgcatgagcttattaaatatcagtttaatacacgtcggaaaaaatatggtacaggagcggccttaagtttgcttaacggaaatgttgggcatgaggtgttagcatttcataaaaaattacccaattatgccgtcacgccgttacataatctggcgcatctaagccagcggcttggactagggtccatccatattaaagatgagtcctggcgttttggcctgaatgcttttaaaggtctgggcggctcttatgctgtaggaaaatatctcgctgataaattgcaatgtgatattaactcgttaagttttgctgcccttaatactcctgagattaaagaaaaattaaagattgtgtttttgttaccgcgacggatggcaatcatggccgtggtgtggcgtgggcggcagagcaattaggtctaaaagccgtcgtttatatgcctaaaggatcatcgttaatccgggcagagaatattcgccatcatggagctgaatgcaccatcaccgatctgaactacgatgatgcagtgcgactggcccatagaatggcgcaaacaaaaggctgggtgcttttgcaggatacagcctggacagggtatgaagagatcccaacatggattatgcaaggctatatgacactagcggttgaagcttatgagcagctcgcagaaacaaacagtccgttgccaacccatcttattttacaagcgggggtgggatcgtttgctggcagtgttatgggttattttgttgaaaaaatgcaggaaaatatccctaatattattgtggttgagccgcatcaggccaactgtctttatcaatccgcagttatggatgatggtcaacctcactgcgtcactggcgatatggcgacgataatggccgggcttgcgtgtggggagccgaatattatcagttggcctattattcgggacaacaccagttgttttatttccgctgatgactgtctggcggctaagggtatgcgtatttctgccgcgccgcgtccaggtacggatacgccttttatttccggcgagtccggagctattggcgtagggttactttatgagttgatgaacaatatgcattatcaggatcttgctaatcgcttacagcttgatgccagtgctcatgttctgcttattagcaccgaaggcgatacgtccccagatatttatgaagatatagtctggaacggacgcagtgcttaaacattacgactaaaaaattagataataaaggtagcatgtaaaaatgcgttttttatacgcataataaacctaatgcaggaagcaagactttataacaatataccattaaaacggcatttagtgagtaagggatgctcctacccgctgactttccagtttagtgttgttggcaaaattcaggattacgctgaactggaaagattatttctgagactgaacgaattaatttaaatccgaggtcattatgttagagcaactttcacaactctttgaatttctatggggtggcccattatttttgtgtgtcatcggcattggtttttattttacagtacgcctcaattttttccagattattaatttaaaagacatttaccgtaatacaattggtacacttgccggaaaaaataaacaaaacactactggcgaggtagcgtctaaaaaatccttaaaatcaatagaggtggctgccactgtgctatccggctcattaggcgcgggaacgatcgcaggtgttgctgcggctattgcggttggcgggcctggagcaattttctggatgtggatcattgcggtcgtgggtatgatgaccaaaatggttgaagtgacgctggcggtgaaataccgaagtaaaggtgagaatggcgaatattatggcggcccaatgcattatattaagaaagggctcaataaaaaatggcatcccctggcaggattatatgcgtttgcattaatgattctggttattacggatgcctgttttgtgcaaactaatacgatggcggcggtcattcactatacgtttgacatcccaacaagcgtcatcggaggatttattgtcatcgtaggcgcgttggttattttaaaaggactctccagtcttggtaaattctgtacgattgcacttccaccgatcaccattgcctatttcattggtgccgctggtgtagtggtattgaatatcgaggctatcccacaggttataaaaagtattttctattatgcctttgcccctgcgccagcagccggtggctttgtcgggtcaaccatcatgatggccatcagtaaaggagccagtcgcggaatattcactaacgaagccggcatgggtacctcggccacagtacatgctactgccaacgtggattatgctttccgtcagggaatgtggggggcagtggaagtattttttgtctcaatgattacctgtaactttaccgcatttgctgtacttgcttctggtatgtggacagacgccagttatcaaggtattcagattatctttgccgccttaaaagaaacatggcatccgattattgttcaggttctctgtctcggtgtggcgttgattctgtttacttcttatcttggttcatatattaaatttcgcacttcgataaactatatctttggcgataagctagaacgcatcattaaatggctatattttttgccgccactgattgccgttaatatggaaatcccggtaatctggttaatggctgatattgctgtcggttttctggttatccccaacgtaattgctctgttcttgctgcgtaaagaatttattagcgaattcaatttattcagaacgcgtacacagcgggacactaattctgaaaaaacaacgcaaattacgcacgtaaatatgtcgaagagtgaagggaaagaggagtaaccatcgcggccagaacaggtaagatggtcagaagagtaacaaagcgcccactttccgggcgcttcgcacaggcatggttaacttgctttacgcacctgcgggagatcgaacgctttacgcagcgcgcgcacaaacgctttatcatgacagatcgttttaccggggctgtcggaaagtttagccaccggctttccgttacattccacgagcttaatcacgatattgagcggttttacctgagggatatcgcaggtcaggcgggtaccgatgccgaagcttaactgcacgcgagaggcgaaatggcgatagagctcgaccgcctttggcagatcaaggttatctgaaaagaccagcgtttttgtcagcggatcaatccccagcttttcataatgggcaatcgccttttcgccccatgcgacagggtctcctgagtcgtggcgtaacccctgataacggctggcgaattcaatgccgaaatcgcgtaaaaacgcatccattgtaatgcaatctgtcaaggcgataccaagctggtccggatattcgttaagccaggcggccaacgcggcacgctggctggtcgccaggtccggactgatttgttgatgcgcctggaaccattcgtgcgcctgagtgcccatcggcgtcagcgccaggcgacgcgcgagatcatagttgctggtgccgacgaaccatgactcctgctggagacgtttaactatcgcctgctgcacttcacgagagaaacggcggcgggtgccgaagtccatcaggtggaagcgggacatatcgagattggcggttaacgcagtgaaatcaaccagcttactttccagcgcgtcgagcgcctgatcaacacccgcgtttggcgagcggtagtgatgaaccagctcactgatcacggccagcagcggcacttcccacataatgacttcacgccacgggccggttaagcgaatattcagcttgccgttatcgttggtgacacagacttgagctgggttatagcgaaactcgcgtaaccagttcagataatccggtttaaaaaagggcaggccggagagccactggaactcgtcctccaggaggcgcaggtgctgcatcgcgtccacctgctcgcgaatagcatcggcataaatacccagcaggtcgtcgccacggcaacgaaactcagccgctacctgcacatcatagtagtggtgaaaaacggcttgctgcatatgcaacttataagcatctgtatccagcaacgagtgcagaacaggagaagcgaattgtgtcataggtgcgctgttgcgtcctctcacgggagcgtttagtacaataaacaactaagaaaaccgctggagtataccttgtttagcgatttattgaaccccgatcacaccataagctgtctttagggtcgagcgcatttcgtgccccatgttataaaaatgtagcgatgcgactgctaaccccttgaatttaaggatttctactgcgctgctaccatgctttggggcagtgatggggcatagcggaaaagtgcctggttgagcagagaaacctgttctgcgctcttctctgacatccactttccatacaccttgtaaaccatctgtgcatcggtatgccccatctgcgttgctataaagtttgggttagcaccagctgataatgaccagcatgcataggtatgtcgtgactgatacgcgttacggtaacgaatgccggcacgcttgattatcggggcccaaattttattaatggaattaaccgcgtagtgatatcctgtgcgaggtccacgtttgacgcattgagggctgaatacgaacgtgcagggctgaatgacagattgtccatattcccgcaacttcacttcaacctcaaactgccggccaaggcgtgtcaactgggcctgattcctcagggcatcaatagctggttgaatgagatatatcaccctgtcagtacctgcgtcggtttttggcagggtgaactcatccgtctgggtaaggttgcgcttcacaatgatcgtcccggcatgcagatcgatatcttcccaggccagaccgcacaactccccatgcctcattccggtatagactgccagtgaccagagatttctcatctgctggtgtccgcatgcctggataaacctgatgaactcgtctgtcgtgagtggatctggttcccctttcgctttcttgagacggttaattccgctaaacgggttttcctttgcatagccgttatctgttccaaactggaagatctcggccatcagcatcatgtaattattcactgtggacgatttccggcctttaacctgagtccggtgatccttcttcattacctgaaagcccgtcagcaactccttcctgacatacagcaaatcctcagtagtcaccgcagaaaccattttgttttcgccgatgagtggaagcatgttttttatgatagattcgtacctactcatggtattagagctgatctccattctcttcagctcggaccatctttcggtaagctccagcacagtaatttcctttctatcctgaccgaaccgggcaaggttcggtgagtttgggaatttttccacatagttaaaattccccatccttatcgcaaaacaaaccgaagaacgcagttcgccagctatcttgcgattttttgcagtgtcagggataccaaggttttccctgacacgtttacctttatacagaaaccagatgcggagcgaaccgccgtggttttcgacgcctgtcgggtatgatgcattagccattaatccctcctgacgtccaggagcattgacgagtgtacagcttttcatgttgtcttcgcacctggttgattttttttctgcgcctcgatccactgatcaacggcttctctgttgtatatgcattcgctcgaaggcttcggatttccgtctggtgaaatgtgcaggtactcgcggcccagcatccaggattcttttctggcgcgggtaatggttccgggcttaagcccggtaaccgcaatcagaactttttcgctaacccacttgtttggcgtcagttggataatgttgctcatcgttttctccagtggccccgcagcgggccatcgctaatattcagtttgcctgtgctggcagatttctaagtttccggacgccgatcattgcggtggctacgtagctggtggcccggttaactacttcaacaggcacctttacgccatccactacaacggtgtaattggtaacgtgcttttgtctgccgtaatcgccgaacttttcatgatgcgccgccagtgcaacatcacatgcgcgacggcccaatggcgattgcttactgcgatttataaggcgcataaaacctcctcaggcgggagggcgtaacccctcccgatgcaattagccgatgtattccggtttcatatcgtccagggtgacgcggtacttatcgtgcagttcgtcgccaagatggcgtttagcagcgccaagcgtgctttcagctttagcaaacatctctgcggcttccggttcgccagggtttggaattgagttgatcactgcctcgactttgttctgtgcatcgacctggtaatagcgcttcactgctttgttttttaattcggtgaacagcgcagtacccagcaacgctttctgtgattcgatatccgcacggattgcttttgcctgatcaacggaacttgctgtatcaatgcgttcgcgaagatcgtcggcaacagcatcaacgttagctgccgactcctgcgcgctggtcctggtgctaacctcgctggtgatttcctgtacgctcatgcgctggactggagcagggttaatctcgcgttcttctcgttgctcaacctcatcagggctgtacacgccgaggatcacttccgggcagtacaggcgagcccaatatttaacgcccagataggcaatttgctgtttagggtttgaaacccatagcggagaattgcgggtaacaacgccggagaggtaaagaggttctccccaggtgatttcagattcacctcgcagaatggcaccaacctgaacgaacaggccgatctcgtcctcatccgtccagccacgaacgcgctcagtgacggtgtacttcccatttttaccgtttttatcgcgtgtgatttcctgtgtcctggtgcagcgctcccagtcacccccatagcggtaatgaaaacggccatgaatggcactggagcttgcgattactgcgttgaccagttgtgcctcgtaaccaagaacaccgttaaccaggtgtgttttctgagccacagcgtaagggttcatgccccattgcatagcctgcatgacgatagccatacagtcggctggtttccctgcaaggtgtgccggtaccgtcacctgtgagtctgccatcaggttagcgaaagctgttaactgacccagtgcctgaacgttaaaaattgcgttactggcagaaatggtgtttggtgcctgctgctcagtggtaacaatatttgtgttttccatgattttccccttatgcctgtacgcgcaacgcttcaaggcggcgcacatcaaaatcgttcagttcgtcggtgtagtcttctgtgataggcgctgaccattcaccagtgtcgaagccgtttgctatctctcgcattgttttgcggtattccagcatgccaagttccagcaactcggtagacgcctcaatgatggcgacccagtggtagttctcgtctttgttgacgaaaatccagaaaaactggtccagcgccgcagtttcgcagtacatggccgcgctcaggtgatagtcccgatcgatgatttcccggtgcaacttcgcacgcaggccttcctgcttgatgttccacatgctgatagttttcaggtcggcgccaatgcgcaggccgcccatatcgagctcaaggtcagggcgtacccgaacttccaacccggtttcctcatcaatcccaaaatagctaacctcgacagcgcggcttgggtgagtcagcaatttgccggcggtcgggtgctccagcagggctttctgaatgttcagcgcggtgctgagctgttggcgggtgaccagcactttcccttcggtgttctcccgccacgcatccagcaattcgtcggcgaataccactgccgggttgactgatttcacggcctgaatcagatcggccttcgtgccagagactttcaacggcgacgatttttgcgcttcctgagcgaccaggtcagggttgattattgccagttgctccagcagcgcgtcacggctgccgctggttttaaccggcgcgggcagggtgacgttgtactctttgatgcaggctttcatcgccgtggctgtatgtttggtgccgttttcaatgcgctggaattcttcgggaagctgctcatacgatgcataggtttcatctaccgaagctccaagcggcatctgcgacggcagggtggcgttgtactcttccagcagcgctttgatatcgtcagcactcagcagcgctggcaggctggcgttgtgcgcgtcgatgaactcgcgcagggtggcggtggtggtgaaagcaccctcagggatctccggctctacgctgaactccgcttcgaggttttccggctgtagagccagaacatgtaccaggttgcccatatcaagcactggagagcgctctttgacgatagtcttctctacgtgacgcgcgttaaagtacatcagcgacacgcgagcatctttcacctgagttgagctgatcccgttggcggcgtggtaaacctcgtttggtacaccttcatagcggcccggctcgaagtattccggccaggctgcttctggctcttcttgttgcgattccggtacgttttgttgcgcctcaggttcagattggctcacagaatcgttgttctggtgcgtctcagcctgattctggttctctacggtaactgcttctttaccagtacccagatcgccttcgcctgcctgcaccgcatcaccagcctgtttttcatcactgtcagctttttgaacctgcacattgctggtggtctccggattcgtttctgtgccatgagttgatgagttctgcattaaagcggacacgtcgaaaataccgttgccaacatttttaaccagttcaggttcggtggtcggctggcttgtcccggtcttcacccattttgggtcgttcgggtcgctgatgccttccacatattcaccgcgcgcggcggcaagctgtcggttggcttcttctaccgcgtctttttccggagtgtgtcgggcagccgtgagagcttcctcggtggggttctcgtgatcagtctccgttaagttggcgttgatatacccctgaaggcgtccggggtagtgataaaactcagggtgtgcgcttcggatcagcgcgaaaatagcggcgcgggaataatccaggataccgggcgttgcgcgaagtgctgcggaccattctttgaacggactttcctttttctttacgatttcttttgcgcgacggtaaacgctgccaggtagctcatagatattaaagtccataggcaaagtggccattgcaatctctacgtccagagtatcgagagtgtgttcgtaatcagggttacggtcagtcttattgccaccgccagcgttggcgccgctttcagtgcgttgaatagccgatacacggttgcctttcgcccactccttaacgagcaaaccgcgatcgatatgctccgtctcgaaccatgttttaaggaactggataacagtcgccagttcaggagtttttccatcgacagggaatatttttttaacggcattcactattttgtgaatgtcatgttcaatggctttcttgaacgcttcaacattctcggcggcaagcagcaggttctggacatatgaattatcggtgtccatttcgagacgcagaatttcttttttctgggaggcgtcgacgtgataaagatactcaccttcacctatgtactgagcaagaacgcggtgacggagaggcatagttgcgacaacagtcagctcgggggctggggctgttgcctgggcagggctgttgctttcgttaccaaaattttcggtgtggtcttccagcacttcgcctgtttcggtatcaacaccatcgacgatatgctggcgcgccgcggcggcggcttcagatgatggcagggtgatgccggggatttgcgtccaggtcatattgtctttagcgagttgatagtaatcgcagaaagtgaggctcagttcgccttccggcggcagctcgttaacgacagggaaattagtagcgacagctttgaaataatctttcagcttcgcaccggatttaatcagaagataatccagtgttgcatttgccgcttcaaaatcatcactgcaccagagtacagcgtctttctggcctgatgatttctttgctttgcggactaaaaatacaggattagttccactcattgttttgtcctcaattcgtgtagaatggaggtgccttaacagcaccccgatatatctggttgttaggtccggttcgctttggtcggttggaccggacagggcacgcccgcttcggtgggcgttttcttaatggatggtctgataaaatttttctgagtaatcaagcttgtaacttcggtaattaccaaaccctgcttgttctccatcacttaccttgactgtgagcagcgaaatggcttttacagcacaatgaggactgtcgaactttccgagtacatatccaccgtcgagattttcgcaattgaataaagcaatgctcttattaactgctttcaggttcatttcgatttttacgatttccataatttctccagtcttaaattcagggtgtatgaagccacgccaaattaatggcgaatttttcatttcatatttcggatctactatttaactttcgtgcgccatctggtcgtattcagcacactgcctggaacaatattccttttctttactcgccagttgcgagccgttgcgatagagaagtgtgttttttacttctttgccttcatcaatggatttgcggcagtaaccgcattgtttaagcatccggatctcctttctgcgccagcaggtagcagaggcggcggattaaaacctcaatccggttgagcgggacagcctgctgtcgagctggtctacgtgcgaaatcaatcattctcaccctcgtttgccttatcgccggccagcggaacgttttacacctgacaacgatgcgcttgttgtcgatgaaactaacgataaaaccaaaggttcgatttgtaaagcaaaaagtgcaactaaaagttctattttggagcataaaaatagcacctaaagaggtgctacctgtatggatgagttctttggttctattttttgaggtcgttaattagatcaaaaacgttgttcttcagcagatccatctcttggaggactgcttttgtatggaggataacacgcagtttctctgcttccgggagttgattgaaaagagaaagcaatgtttcttctttttcatcaaggactctgggtttaggttcagccctttcgccttcactttcatcccctggctccatgaagaaccaatattcaggccttccggtcaccgccgataaccttttcaagcgctctccgctggctacagacgtgccagaggcccactttctcacagatgtgtgagaaagcattacgcgccgtgagaggtcagccatagaccagccgttctcatccagaacttgctggatacgcttggcgaaaatgggatgaagatttttgttcatattcacattttacaaccttcagtttctttattcattggaactattagattgatttttgttggaacctaaagttttacgtgataatctccagctaccaactcgtagaactggagagccaaatggacaaccaattaaaaatcaaaatcagtaaccacatgactcaaatgagcatcggcgaacattttggtatctcgtctcaagctgtaggcaagtggctgagaaaaggagtaattcctccccgtcgcatcctgccgttatgtgaaattcttgaatggaaagtcactcctcacgagattgacccagcagcatacccaaacccaaccgatggcttaccaagccaagaggcatcagccaaataaccatagaggatatttacccatggagaacgcaattgcacgaaagttagacccaccagaaatcaacccgattgagatagagagcgtcctgctcaaccggcttgcatcagtagggcagaaatcatacgccgagcatatgggcatcagcgagtcgacagtcagcaggcgtaaagctgagggatatttctgcaacatggcgaaagagctggcttttcttgggattcaggccgcgccaccggaagcggtactggtatccagaaactatctcacagcagtagagattctcgctgatgccgggctaaaggctgaacgagccaggccggatgcgctggggtgggactgaaaatggcagcaactaaaaaggcgaaagccgcggtgaggggtcaccaacggctttctggtgcaaaaacggtaggtaattgcggagatgagtatgtcaaataccgctgaaatatacaaattccctgcgccgataccgacgcaacaggagtgccgtatggctgatctggaaaatggctatttacgtttagctaatcagatccaggacgccttgtgtatcgttgaactatcggggcgtgagttccgtgttttgaatgcgattatccggctgacttatggctggtcgaaaaaatcagatcgtattgccaacagcctcattgcagataagacaacactgaaggtaaagcatgtatccgaagcggtgctgagtcttgcctatcgtaacatcattatcctgcgccgtattggtcaaacaagatacatagggattaatacaaacctggataaatgggcttattccaagccacattgctcaaaatgtccggtgtcttttcctgatgatgaaattgccacatggattatttctgtacctgaaaccagggatagttatccccgaaaagggggaagggcatccccgaaaacggggatagttatccctgaaaacagggatagcgttttaccccattcagccatccctgaaaacggggatagttatccccgaaaagagggaagggcatccccgaaaacagggaacaccaaagacattattccaaagacaaatataaaagatctaaccccctttaatccccctaagggaaaagtgaagtttgatccgttgagtattcctgttcccgaatggctgaatgctgcgtcgtggaacgaatgggtcacataccgccagcaatccggaaagcccataaaaaccgaactgacggtaacaaaagctttcaggcttctgaaggagtgcctggatgaaggccacgatccggtaaacgtcatcaacacaagcattgccaacggctaccagggactattcaaaccgaagttcgctctcaacgaccgaagagctggcagagatgtgaaccacatttctgcgccagacaaaaccattcctaccggattcagggggtaacgatgaaaaacgtaatcggtactggcagtgcgcttgatcgcctgaaaagaattatcccagccagtgtgcagccgaaattctcgactgctgatgagtggcgggcatggcaggaagccgaagggcgtaaacgcagtgaagagcttgacaggatgaatcagaaatcccgcaccgagaagattttcgggcgatctggcattcaggatctccatcgtagctgtacgtttgctaactacgaagtaagcggggaggggcagcgaaaagcgtacacgatggcaaaaagttatgcccagaacttcggtagtggatttgcgagctttgtgttcagcggtggtccgggaaccgggaaaaaccatcttgcggcggcaatcggaaatcatctgctggccggcggtcatagcgttctggtggtaactattcctgacctgatgctcagggttcgtgagtgctacgacggtgggcaatcagaagcgtccctgcttgatgacctttgtaaagttgacctgctggtactggatgaagtcggtattcagcgcggaagcagtggtgagaaggtcattctcaatcaggttatcgatcgccgtctctcatcgatgcgacctgttggcgttctgacgaatcttaaccacgaggggctgttggattcactgggcgcgagggttatcgatcgcctccagatggacggagggatgtgggtgaattttgactgggaaagctaccggaaaaacgttagccacctccggattgtgaaataaggggttaaaaatggcccgacctaaaacacaaagcgaacggatgattattcttgagcggattatcggtctggtgaaagagcaggggcgcatcacgacgaacgacgtcgttgcgatttttggcgtgcaccgaaccacggcggagaaatatctgcgtatcgcgctggagcgaggcggcttcattcgtcatggccgctgcggcattttccgagaccagcgtgcggtgattgattatgacctcaggcgatacagcagtagtcaggtaacgggattttcagcgctgccggtgctggagaaaagcccggtaatgcaggtttatggagcatccaaaatgagcatcaacaaggggggagcccaatgagcaacatcgacaaacgggcgcttcgtgaagtggctgagagggctacgccggggaattggcgccgcacctcatcactgttcaatggcatcacggtaacgccattttctctttgcggtgaagaagtgacgttggcccatactgttgagaaacgtgacgcggaatttattgccgccgctaaccccgccaccgtgctggcgctgcttgacgtgctctatgagtttggagaggatgaggtggccatctctgaatacgtcacaaatcttgaagatgctttgcgagttgcggcagcacctcagcaggaggaatgatagctggttaaatccacagcagaaagcaaaagcattattaggtacaatcacactaactttttgttgttaattatttgatgaattacgaggataagctcatgtatcagcgaatgatttttgaagaaggaaaagagccaaggttgtattcaagccaacatgactccaagtttatcccaataagtaataacaatggaaaagttcaaaaggttcctgttatggagttcaaggataccagaggagatgttttttatgcttacaactatgcttattctggtaaaaaaccatcaaatgacgaaatctataaggctattgatgagctaaagccaatcggtgaaaaattcgaaatgtctaagactataagcgattagataaatctgttttcaacattgcagcaaaatcacaggaagatcgagacaaagttagcatggcgatatatggaaatgtcggagcagaacaccaagaagtaagcgtaatttgaatgaatgtgaacccgccgagtacgggttttcttttatctgaacccgctgcggcgggttttttgcctaaaatgtgatatgaaacaacacactagcctttgcaaaaagtgctattcaccccttgaatattctttctaacaggtatactgtgtttatatacagttgttgaatgtagagggaattatgagaattgaacttgttatcagccgggcaaaacagcttccggaaggtgccgttcctgcgcttgaaaaagaattaattacccgtctccagaatcagtatgaaaactgcaacttaaccatccgtcgaggcagtcaggatggtctgagtatcgtcggtgctgctgatggcgataaaaaacgtatacagagcattctgcaggaaacgtgggaaagcgctgacgactggttttattaacattgcgcttaatgctggcgcgcatttttcagaatatcgcaatttgcgtatccctttgatgctgctgccgacaatttttaaccgcgtccgtgtgtcgctcaggggggttacgtggcagagggagtcctatcagatcttgctgataatttgcgggtgactataactgatgctaagggaatagaacttttgtcttttagacttgcatcaggtgatcgctatatcctatcaacccaaaacggttctgtaacaaaccgaaagctatcaagagatgatttgtactggtctaaggataccattatggaagttgtcagagagatgggctctaataattgacttaacaataagcacgcaatcataattatcgcactggcctgaacaaccagtaacctgacaattatgcgccacggagaataccatggcgcacgaattacaactcatcaagcagtcatctggaattctgatccccgctacgccggagaccagcgaaattctgcagtcaaaaattaaactcggtgccgtgctggtggctgagttccgtcaggttaggaatcctgcattccatcgccgctttttcgcgttgcttaatcttgggtttgaatactgggaacccaccggcggcaccatttctgccaatgaacgcaaactggtaaacggttatgcaaagtttctcgctgcatatggcgggaatgagagcgcattactggatgcggctgaacagtatctggaacagattgcaaaccgccgggtaacaaacggaattagcctctgtaaatctttcgatgcataccgcgcatgggtgacggttgaggctggccactatgacgccatccagttaccggacggcacccttcgcaaacatccccgcagcatcgctttttccagcatggatgaggtcgaatttcagcagttgtataaatccgcgcttgatgtgctctggcggtggattttatcacgtacatttcgtactcagcgcgaggcggagaacgccgccgcccagctaatgagctttgcggggtgatggcgatgaaatactcctggttccatcatcacgactgcacaaccgagcaggccgacacgctgatatcggattatcagaagcggggcgtaaggacagaaaagagcctgaaccctgacttcattacctggactgtcagcgcgaaattacctgaatatgcacaccgggtgcggacgccaaaatccttacgccaaaaggtctgggggtgaacatggctaaattaccgcgccgtaagtgcgcaaacaaagaatgccgccagtggtttcacccgatacgcgaggggcagatcgtttgctcgtaccagtgcgccagcgccgtcggcaaagaacagaccagaaaagctcgcgaagccgcgcaacgtaaggcgcaatcccttcagcgcgccgctgagaaaaaagaacgcgccgcctggcgccagcggaaagccgcggttaagccgctgaaacactggattgacttgacgcagcgcgccgtaaatgacatttgccgcgaaaccgaactggcagaaggactcggttgcatctcctgtggaacgaagacggcattcgcatggcatgcaggccattacaggagtacggccgccgccgggcatctgcgcttcactcgcttcaacatccatcttcagtgtgatgtctacaacgtctacaaatcagggaacatcgaagcatatcgtgccgcgctggttgagcgttacggggaggcggcggtgctggcactcgagaacaataacaccccgcaccgctggacggtcgaggagctgaaggaaatcaggctcgcggcactggcggatctgcgtgcgctaaaaaagctggaggccgcatgaaaccagaactgatcgagatactccgcatgcgctggttgcgtctccgaatttatcgataccggggatcttttcctgtggcatatcgcattcttcgtaattacgtccgcattgaagcaaaacgggagcatcgaaatgaatcttgagtccttaccgaaatatttttcacctaaatccatgatgcccggcgcagtaccatgcggaataacgtctgatacgctgactattactgacgtaatggcatctctcgggctacttactgcaaaagccgcagtgggtattgaattgtatctggcaaaagccggggttttatcttctgaaaatatcatcgcctacatcaggcaattagcagagcagcgtgcagaacggcatggggcattacggaaaatggaaaagggtaagcgctcaaaatttctcgacactatggcgcgttatgtatttcgcgattattccctcagtgcggccagcttggtgacgtgcagtagctgtcatggtgctaaattaattgatgctgaggttttcacgaacaaggttacttacccggatggtaagccaccaaaatgggtaaaagatacgaaaggtatttctccgtccgactgggaggtgtggaaatcagttcgtgagcaggtgcgcgtagtgtgtaaggcgtgtgatggcaaaggccatgtgaaaaatgaatgtcgttgccggggacgcggagaaattctcgataagaaaaaatctgagttgcagggcgtgccggtttataaaaaatgcccaagatgcaagggaagaggctacccacgtctcaaagataccgagatttttaaagcactaggagtaacggaaatggtatggcggtacaactataaactgtttttcgatcggctggtggagcattgccatattgaggaatcgtatgcagaaaaggttctgggaaacgtgactcgatgaccaaaataatttagctattgcaaaattaacggaaaatggctaatctgattccaacgatgggttattatgcctgtgacgttacaagaattaagaacctcgcctcggcggggtttttgttttttttggtggtatattcccttggtgtcaaatcacagggggggcgatatggggttctattacgtttttcaatacaagccgaaagggatgtcgtcgggtaagcatttaaatgtttccgaggagttttcggaccggaatgaggcaaagagagcgaagtccaggcacatgattaatgatccagattgtgtcttctcgggaatcgtgcaggctgattcgccggcagcggtacttcaagaagtacaggctgaatctcttaataggctttaacggatttaacttggcagtatccacattaccaatttcattaggtcgcttcggcggcctttttctttttcaggcaccgggcatcatccgctacgtgcttggttgataaatccagcccgtgaagcctgcccctttcatcacacactgcgccatccgagctatcggaggtgaggcttatgaaaatgcacaacgatccccattcaatggactcacaatctatttttgctggctcacaattactgccaatggaaaaaacttctcatttggctctgagcgtcggatttcgctctcacttagcgtgagtccacgtccgatttcagttgcagttattgtgagccaaaatttgcgctgattgcgagtctgacttttttcgattgtgagtcgttacagatagccgccgggccagacaccacaacggtaccaggtggcgttatgtgctagaaaccgaaattcttgaacatctcattactactcatatcgttggctggcgcacggttcatcgactccatctgcttaatcaaccctatgctagcaccaacaggccccccgacgctgaaaccgacgctgctggagcgggttttgctggtgctactgctgtgggtttgactacgggtgttacagttgctttggtgtgtccgtgtgagaccattttcgttgagctggctatcttcactttgggtgcagtttccctgtgactggctgtgactgtctcctgtggtgtggttgcggctatccgtgtgccactcgctatagcctcccgccggcgcaatgattccgaccgatgtaccgtgggtggcatagggaggcatgaccatgccactacagccaccgagcagtaacgcggtgccgacgataaaaatgaacttacccagagcggtgtttttcattagttcctacctatttcttctcgttggttatttctatgccctgccttggcagggctcgctattattcattcttcaactgtgagatcaagttattttaattaaatcggtattattcttaattgtgttctttatgaataaatatcctccggctatgccggaggatatttattatttcctctcataactgagaggccccacacaaccagagggggatgaatgtccgaatcgatttccggtactgggttagcaggtggcatcctgacaggagccagtgtctatggactgctgacctgtattagctcagacctgaactggttactgtgttgtagcatcgtgggattttgcattttttgatgagtgtcaattactaaattcgtaggcgattcttggtggtgatgtgtgacccatctcttttaaaatgatattggtatactcgactaccgggcctcttggattactgtcttctttgtcctgaaggtgagtcaacgcgtgtacaacttcatgaataaatgagcgtgttgtatcaaattgttgtgggccatcattactttcatagtactctggtattgaatcatcgtctgtatcatccaggttgagggcaatcacttttctgccttctgaactctccaggtcctcatcagttacggtagtaccaaagttttctccggctcccagcaaccagcgttgttctacatcatgcaattcctggtcgtaggcataattcatcagtctgcggaatgtcccgctttgagtgtatgcatcttcaagtatgcgtgatagcacctcacggcattcatcataggtatcatcatcaatttcgatatcaggatccattcctcctggtccagagataaggtattcagcaagacacattggttccagcctggctttatcatcggtagcaagaccatcatgttggaggcgtaattgcgaaggattatcttggtgttctggaaggtctggaaataccttgctgtcatgaggatgggataatccatatgttgacatcatattattgataaatattggtttaattcccgttggcatgatgagttacacatcctttttattacatggaattaacattctataaatagcatgtttttgtcaaacagaattcactcagcacgcaatcaattaaactaaaagctaaatttgcagtatttgtgcctcacctccattaaaattgtactctgcgtgattttactttcagattctgcaaccacaggcaatcctgttttacaagatattaaaccctgcaacccaaccatttcactcactctagttaccatccgaaatcatcggaggtgaggcttatgaaaatgaatgacaagactcctgaattctgggctgcggttttgaccggactcaaaaatgcgtggccccagatacttggggcgttaatggccggactcattgcctacggccgactgatatacgacggcgccacccgtaaaaataaatggcttgagggcgtcctgtgtggcgctctttccttatgtgtcaccagtgcgcttgatgtggtaggcctgccggtttccatttcgcctttcgttggcggaattattggctttgtcggtgtggacaagctgcgcgaaatcgcaattagcgcactcaaaaaacgtgcaggggttaatgatgagaatcagtgaaaaaggcattaccctaatcaaagagtttgaaggttgtagcctgacagcttatccggacccgggaacggggggagatccctggacgattggttatggctggacccactctgttgacggtaagccagttaagcccggaatgatgattgacgaggctactgccgagcgcttgcttaacactggtttagtcggttatgaaaatgatgtgtccagactggttaaggtcaagttgacgcaaggccagtttgatgcgctggtgtcgttcgcgtacaacctcggcgcccggacattatcctcatcaactctgctgcggaagctaaacgctggtgattacgctggcgccgctgatgagttcctgcgctggaataaggctggtggcaaagtactgaacgggcttacccgtcggcgtgaggcggagcgtgctctgttcctgtcatgatgttcaactggaaaacgatgtttgttggcctgttgcttgtctcgctaattgttgccggtcggctggcaaatcactaccgaaataacgccatcacctacaaagagcagcgcgataccgttactcataggctgacgctggcgaacgcgacaattaccgacatgactaagcgccagcgtgacgttgccgccctcgatgaaaaatacacgaaggaattagccgatgcgaaagctgagaatgatgctttgcgcgatgatgttgccgctggccgccgtcgcctgtacgtcaacgcaacatgccccgcagtgccgacaggtaaatccacctccaccgcccgcatggataatgcagccagccccagactggcagactccgctcaacgggattatttcgccctcaaagagcgagtgaagacgatgcaaaagcaactggaaggggcgcaggcgtacattcgcacccaatgccacggtaatgcaggaaaaactagtaaccaatggtgactgtattaaaaaggtactcccgggcagggggcgccacgggtggcttcgggctcgcgggaatcggctgatttttgattttttagtctctgtcagcactgaaaaataaccttaaaaatcaatacatttactgttttcagtgtcgaagtggtacgttttttgttcgacactgaacgccattttcaccgtatacaggaaaagagcacgactgtggatcaggaaattaaaagcctcgaattaaacatcacacagctttcggccatcactggtgcacaccgacagaccatcgccagcaggctgaagggcgtaaaaacctcaggtgggaacggtagtaacctgaaaatctaccggctggtggatattctgaccgccatgatgacgatgccggctgttaccggggagaatgaccccaataagatgaaaccctcagatcgacgggcatggtttcagtcggaaatgacgcgtattgagctggaaaaggagatgagaactctgatcccggccagcgaggtgctgagcgtttatgctgtcatggcaaaaacggtcgtcaagacactggagatactgccggacttactggaaagggatgcggcattgccgcctgatgcgctggaaatgacgcaaaaaattattgatcaactcagggaagatctggccagcatgacataccaggcctgcgcggatgctataaacggagatgatgatgacaacggtgacgaagggcaagaggaagagcaggaatagtttagcctctgccgttgttgccggatgtgatatctcatcgatgttcaggccgccgcgcaggatgaaaatatcggatgcggtcagaaaatatatgcgcgtaccacgcgatgcgggaaattctgtggcatgggaatccaccctgaccccctatgtggtggaagccatgaactgcctgtcatcacgcagctacgatgccgtggtatttgtcgccccggcaagaaccggtaagacgctggggctgattgacggctggatttcctacaatattgtctgcgatccgtctgacatgctggtggttcagatgactcaggacaaggcgcaggagcactcaaagcggcgtctggcaaagatgtttcgccacagtccggcgatagcaagaagactcagccctcaccgtaacgataataatgtgcatgataaaacgtttcgtgatggctcgtttctgaaaattggctggccatcaatcaatgttttttcgtcttcggattttaaatgtgtggcgctgactgactacgatcggttccccgaagatgttgatggtgagggggatgcattctcgctggcgtcgaagcgtaccacaacgtttatgtcgctgggtatgacactggtggagagctcgccggggcgggaaattaccgataccagatggaaaccgtcatcaccgcacgaagcaccgccgaccacaggaatactttccctgtacaaccgtggcgatcgtcgtcgctggtactggccgtgtccgcattgtggcgaatattttcagccatcaatggcgaatatgaccggctatcgccatattgccgaccctatggaggccagtgaagcagcgcggattcagtgcccacactgccataagttgactgaaccacagcagaagcgtgagctgaataatcgtggcgtctggttgcgggaaggtcagcacattgaccgcgacggcaatattaccggcgaagcccgccgctcacgtatcgccagtttctggatggagggaccggcggcggcttatcagacctgggcgcaactggtttacaagctgctgaccgccgaagaggaatacgaacgaaccggcagcgaggaaaccctgaaagccgtcatcaatacggactggggattaccctatcagtcccgtcgctcgctggaggcacgcagcggtgacgcgctgatggcacgcgctgaggacgtatcaaaacgtaccgtttctgacggggtgcgttttattgtggcaaccgttgacgtacagggcggtaaaaagcggcgctttgtggtccaggtagtgggctatggcgcatatggtgaacgctggatcattgaccgctacaacatccgttattccctgagagtgaatgaggatggcgaaagccagcctgtcaatccggctgcaagaccggaagactgggatttgctgaaaacggatgtgctggaaaagacgtatccgctggcggcagatcctgaacagtttatgccggtactggcaatggcggtggactcaggcggtgaagacggtgttaccgataatgcctacgcgttctggcgaaggtgtaagcgaaaaggcgttgccgggcgcgtttatctgttcaagggagacagtacccgacgcgagaagctgatcaccaaaacctatcccgataacaccgaacgctcagaacgtcgggcaaaagccaggggggatgtgccgttgtatctgttacagaccaatgccctgaaagacagggtagctgccgcactggagcgtgaggagccgggggcgaattacattcattttcctgactggctggggccgtggttctacgaggaactgacctatgaagagcgcagcgcagacggaaagtggaaaaaaccgggacgcggtaataacgaggcgctcgatctgatgtgttacgcccacgcgctggctattctccgtggctatgagcgaatcaactgggaaaaaccaccaggatgggctcgcttaccggaaaaagacgccgcaaaaaccacgcagcctgttgaggttcgccagcaggagcaacacgaaggaggagagaaagccgtgaaagccaggaagaaaaaaattttacccgcctggggcggtggttccggaggagggtggttatgaccagggcagggctacaggagttgtacaacgcctatctggaggccgagcttgctgtactgaaaggcaagtccatcatgcttaacggtcagtcaatgacaatggaaagcctggaggaaatcaggaaggggcgccgcgagattgaagacaggttacagcggttaaataatccgcgacggcttttcacccgggcgaggttgtcatgaattttatcgataaagctatcagcatgatgtcgccgggatgggctgtatcaagactccgatcgcgggcagtaataaaagcttacgaggctgcaatacccacccggacacataaaattaagcgtgaaaaccgcaacgccaatcaactaaaccagattgccggaaagtccctgcgggagcaggcccgctggttcgataacaatcacgatctggtggtgggggcgctcgataagatggaagagcgcgttatcggggctaaggggatcatcgttgagccacaaccactgacggtggccggaacgctgaataacgcgctggcggaacaaatccgcgccagatgggcagagtggtccgtgtcgccggacgtgaccggacaatatacgcgcccggtactggagcgccttttgttacgcacatggttgcgggacggggaggtgttctcccagatggtggcgggaaaaatgccggggcttgagccggtggcgggcgtaccgttctggcttgaggcgatggaaccggattatgtcccgatggaacagacggacagtacaaataatctgattcaggggatctattttaacgactggcaaaggccaaaaagttacatcgtctgtaaatcctggccgggatttgccaccgctatggtggccaccaagcttatcgatgcagaaaatatgctgcatcttaaattcacccgtcgcctgaatcaggcgcggggcgtcacgctgctggcgccggttattatccggctgctggatctgaaggagtatgaggacagtgaaaggctggccgcgcgtatttcggcggcttttgccatgtttatccggcgcagtgacgcaatggtacaggatggtgacgcgccagattatgcggataaagaccgcgatctggatattgaacccggcaccattctgaaagacctgttgccgggagaggatatcggcaccatcaaatctgacaggccaaatgccaacctggagtctttccgtatggggcaactgcgggcggttgccgcaggtgtacgcggaagtttttcttctattgctagaaactacgacggcacctacagcgcccagcgtcaggagctggtggaggctcaggagggatacgccattctacaggataattttattgctgccgtcagtcgcccggtttaccggcgatggctggcgacggcgattacggcgggtgtgatagatgtgccgacggacacggacatggcgaccctgtttaatgccgtgtattccggtccggttatgccgtggatagatccgctgaaagaggcgaatgcctggaggatactgatacgcggcggggcggcaacagagagtgactgggtgcgtgcccgtggcggcgcacctgctgaagtgaaacgccgccgtaaggcggaaattgacgaaaaccgtaagctgggactggtatttgatactgatccggcacatgacccgggggaacaggataatgccggaagtgaagacaacagtggcggcgataaaaatgccgccggtgatgacagcagggaacggacgcggggagggaagcagtaatagctggtattccatcagggctgcagccaataacacggcggaagtccgcatttatgacgagattggtggatggggaatttcggctcgctggtttgcagaagaactggctgcactgggacagattaaccggataaatctgcatattcattcacctggcggagcagtactggacggaatagccatttataacctcctgaaaaatcatccggcgcaaaaaaacggtgtatatcgatggaatggcctgctcaatggcatccgctattgcgatggtaggtaatcccatcattatgccggaaaacgccatgatgatgattcataagccgcgcggagtggcggggggtgaggcggaggatatccgggaatatgctgacctgcttgacaagatcgaaagcgtcattatccccatctataccgaaaaaactggaaaaacgcctgaagatattgctgccatgctggcaaaggagacctggatgagcggcgcggagtgcgtcagtgaagggtttgccgacaaactgatacagcctgtaaaagcaatggcctgtattcattcaaaacgtgttgaggagtttgagcatatgccacagagcattaaaggtatgattatcgccccgcagggcaatgcaggcgcgcaaccgcagccacaggcaaaagcccctgagtcacagattcagtcgcaggctcagtcgctggtgactgtagatgaaaatgccattcgcgcacgcctgcaggaagaacagcgtaaccgtatcaccggcattcagaatgtgttttcactttccggcgatcgttatgcctcgctgatggcaaagtgcattgctgatgtggattgctctctggaaatggcgaaggacagactgttggccgagatggcgaaaggtattacgccgactaaccagctgaatggtccgcagaatcgcgcagagtttcatgccgggatgtataccggaaacggtaatattaccggcgacgccgttcgcgctgccgtgatggcccgcgcaggctatgaagaagcgcagaaggataacccgtacaactgtatgaccctgcgtgaactggcgcgaatttcgctggtggcgaggggtacaggcgtgtccagcatgaatcccatgcagatgatcggcatggcatttacgcacagcacctccgatttcggtaacattctgctggatgttgcaaacaagtccattctgcagggctggcaggaagcgccggaaaccttcgatgcctggaccaaaaaaggacagttgtctgatttcaggattgcgcaccgtgtgggtatggggggattcagttcactgcgtcaggttcgtgaaggagcggaatacaaatacgtcaccacaggggataaacaggcgaccattgcgctcgctacctatggggagctgttcagcattacccgccaggccatcatcaatgatgatatgaatatgctgacggatgtcccgatgaagctgggacgtgcggcaaaagccaccattgccgatctggtttatgacgttctcatcagtaaccagaaactgtccagtgataatgtggcgctgtttgacaagacgaaacacgcaaacgtccttgaaaaagccgttatggatgtggcgtccctggataaagcgcgccagctaatgcggatgcagaaagagggcgatcgccacctcaatatccgtccggcatttgtactggtgccgacggcgatggagtctgtttcaaatcaggtgattaaatctgtcagtgtcaagggggcggatattaacgccgggatcattaacccggtgaaagatttcgccacggtgatcgcggagcctcgtcttgatgacgccagtcagtccactttctatcttactgcagcaaaaggcagcgataccgttgaggtggcttaccttaacggcgtggatgagccgtatatcgaccagcaggaaggattcacggtggatggcgtaaccacgaaagttcgtattgatgcgggcgttgcgccggtggattatcgcggcatggtgaaatgcaccgtataacccactaaaagcagacattaagcgatacggccctgacgggctttttttatacctgaaatccggcacggcgtgccggaaaggagaataaccgtggctaagaattacgtggaagacggcaaaacgattgaaattgtggcgaccacgtcactaaagagcggagatctggtacaggtcggcgatatgttcgctgtggctgttaccgatattgccgccgggagcgccggaaccggcatcgcagaaggggtattcagcataccaaaactgacaacagaggatattgccgtcgggaaaaaagtgtatctgaaggataacgtggttcagacggatgcaaccggcagcctgccgtatgtcggggtggtatgggcgccagcggcaaacggtgatgaaaccgttccggtaaaaattaatggctgacctttttgacgggatgaaaaggcgcatggatgcacttatcgcagaacgcttcggcatgaaggtcaacatcaacgggactgactgcatagtggtggagtctgattttctggctgaactggggcctgttgaaggaaacggaaaaaacgtagtggtgttttcaggcaacgttatcccgcgccggggagacagggtggtactgcggggcagtgagtttaccgtgacccgtatccggcgttttaacggtaagccacaactgactctggaggagaacaatggaggtaaaggggcttaaagaggccatttcagtacttaaagaacttgatcgtggatatgtgacccgggcaaaaattcgggccattaaccgggtggcaaaacgggtggtcagcgtgtcagttcgcagtgctgctgctttggtggtggccggagacaaccgacggcagggtattcccgtcagaacggtaagacgtcgcgccagagtcaggctggccagagcggacaagccttttgccaacatttatgtgaactgtgatccgctgactgccatcaggttactgagttcgccaccatcaaccccgatgagggggagaaaaggtaagccgctacgtataggaaaataccgttttgaccgggggtttattgcgcaggctccgaacggatggtggcaggtatttgagcgttccggtgccggaagatacccacttaatgtggtgaaaatcccggttgctgatgcattgcgccatgcgttcaacacgcaggttgttttacagatgaaaacggagatgcccaaagagctgaagcatgaaatcagttatgaactgaggagattcactaaaaaatgacccgacacagtgcagtacggcaggccattattgccgcattaaaaaagaccgatgatggctccaccacgttttttgacggtcgtccggtcgtggtggaggaggatgagttacctgcggtggcggtgtacctgagtgatgctcagtataccggtcctgaggtggacggtgatatctggagcgcggtgctacatgtggaagtatttctgaaagccactgcaccggacagcgccctggatgaacagatggagaacagggtgtatccggcactggggagcgtggcgggactgggtgacatcatccggacaatgtcggcgcaggggtataactatcagcgagacgatgaaatggcgatgtgggggtcagccgatctgagttacgacatcacctattccatgtagaggaaaagagaatgacagacacgacaattcctaatccacttgcgccggtaaaaggcgcaaataccacattctggatgtacaacagcgagggtgatccgttcgccagcccgctaagtgataataactggctgaggctggcaaacgtaaaagacctgcagccgggagaactgacggcagatgcagaagataataactatcttgatgacgagaacgctgactggaaaagtaccacacagggacagaagtctgccggggatacttctgtgacgctggcgtggaagccaggtgaggacgtacagaaaaagcttattcaactgttcacgaccgggcagaagcgcggattccggatcaagtatccgaacggcactgttgatgtgttcagaggctgggtgagctcgctggggaaaacggtgcagagtaaggatgagatcgcccgtacagtaaaaattaccagtgtgggccgtccgtacatggctgaagaggatgcaccggaagtggttagtgttaccggactgacagtggaaccgacaaatgccaccgtgaaggtcggcgccacaacagcggttacgttcacggtgaaaccggataacgtgacagataaatcactgcgtatcgcaacgtcagatccgactacagccaccgtcacgcaggcggaaaatattgccactgtaaaaggtgttaaggcaggtacagtgaaaattattggcatgacaacagacggtaattttaccgctattgcggatattactgttcaggcataacccacctctcgtcctgttttggggcatttttttcaggaataaatcatgtttttaaagaaagagacgtttacccggggggatgcgtcggtggcattgttcgagttatccggcctgcaacgtattgagtacctggagttcatccagaaacgtactgcgaaatatgacacggatatggatggtacgacggaagcggataagcgcgtggcttatatgcaaatggcactggaaattaatgcctggctggtatcccgctcgcttctgaatggtgattcttctcaggatgcagacacgctttatcagtcagtacaggcgaagtggtcgtatgaggcgctggacgcaggcgcagaaagtgttctgatgctcagcgggctgtctgcggataagaaagataacgccagtgattcaggtaatgaatcagaggacatgacgccggaaaagtcctgaataatgagcttcattttgtccggcaactggcccgggagttccggcggcctgactggcgccggatgctggacgaaatgagttcaactgaacttagtgagtgggctgatttctttcgggaaaacagtttcagtgatgccctgctggatgcggagttttccacgctgaaagcgcaggtgttcatgctggtgacggggaaagaaatcgatgcagcggacttcagtttgctgacattacccggagcggtacagagcatgacggagcaggatctgcttgaagtggcagtcggtattccgggaggagtgagatttgagccagaaagtcggtgatatcgtcatcaacatggatgttgatacagctaaagttgccgccggtcttcagactgccagtaacgggctggggaagctggtggacagcagtgatctcgttgaaaaacgcatcaagcgatgtatggagtccagcgccagaagtgtggcggcatcggcaaaaagtatcagtgccgctatggcgcaatcacaggttgccacacgcacacagagtgacgctatggcacaactggcgcgtgaggcgaacgaggccagagaaagggctgtcgacctgaatcagaagttaagggcggaagctgcgcaggcagcggtggttgcacaggctcaggatgcagccgcagcggcattttaccgtcagattgacagtgtaaaacagttaagcggtggtctgcaggagttacagcgtatccaggcgcaggtacgacaggcgaaaggacgcggagatatttcacagggcgattatctggcgctggtgtctgaagctgctgcaaagacacgcgaacttaccgatgcggaggcgctggccacgcagaaaaaagcacagtttatacgtcgactgaaagagcagacggcggtacagggcctctcccgtactgagttgctgcgggtgaaggcggctgaactgggggttagcagtgccgccgatgtctatatccgcaaactggataccgcaacaaaatccactcatgcactaggactgaaatcagcaatggcgcgccgcgagataggcgtactgattggtgaactggcacggggaaattttggcgcccttcgcggttccggtatcacgctggccaaccgggccgggtggattgagcaactgatgtcgccgaagggcatgatgctcggcgggctggttggcggtgtggctgcggcggtttacggactgggtaaggcgtactatgagggggcgaaagaaagtgaggagttcaataaacagcttattctgaccggaagttacgccggaaaaaccacaggcaagcttaatgaaatggcgaagtcgctcgccggaaatggcgtcacgcagcacgacgcggcaggagtactgacccaggtggtcggtagcggagcgtttaccgggcaggcagtggcaatggtatcccgtaccgcggccagaatgcaggaaaacgtggggcagtcagtggatgaaaccatccgccagtttaaacggctgcaggatgatccggtgaacgcggcgaaagaactggacagggcactgcattttctgactgccacccagcttgaacaaatcagggtgctcggtgaacagggaagaacggctgatgctgcgaaaattgccatgtccgcgtattcggaagagatgaataaacgggcgggtgacgtacatgataatctgggctggatcgagaaggcatggaatgccgtgggtgatgcggcgaagtgggcgtgggatcggatgctggatatcgggcgggaagatacgctcgatgaaaaaatcgcgacactgcaggaaaaaatcgcgcgcgccagaaaaacgccatggacagtgtcttcctcccagactgaatatgatcagcagcaactgaacgaacttcaggaacagaaacgccagaaggacctgctggatgcgaaggcgcaggcagagcgtaattatcagaagactcagaagcgccggaacgagcagaacgccgcgctgaaccgggataatgaaactgaatccctgcggcatcaacgggaggtggcgcgcattaccgccatgcagtatgccgatgcagcggtacgcaatgccgcgctggagcgtgaaaacgaacgccataaaaaagcaatggcacggcagaaggaaaagccaaaggcttactacaacgacgaggccgggcgactgcttttgcagtacagccagcaacaggcgcagactgaagggctgattgccgccgcgaagctttccacgaccgaaaaaatgacggaagcgcataagcagcttttgtcatttcagcagcgcatcgctgatttgtccggtaaaaaactgacggcggatgaacaaagcgtactggcacataaggatgaaatagcgcttgcgctacagaagctggatatctcacaacaggatttgcaacaccagaatgcctttaatgaactgaagaaaaagacgctcacattaaccagccagctcgctgacgaagaatcccgcgtcaggcagcagcacgcactggcgctggccacaatgggtatgggcgatcagcaacgtggccggtacgaagagcatctgaaaattcaacagcactaccaggaacaactggagcagcttaagcgcgacagcaaggcaaaagggacatacggttctgacgaataccgtcaggcggagcaggaacttcaggccagtctcgatcgccgactggctgagtgggcggattataacgcgaaagtggatgctgcgcagggagactggacgcagggcgcgtcgcgggcgctggataactttctggcgcaggggggcaacgtggcaggcatgacggagaacgttttcacaaacgcatttaacggcatggcggacagtatcgcgaattttgccgtgaccggaaagggcagtttccggagcctgacggtctccatcctggctgacctggcaaaaatggaggcacgtattgcggcttctaaactgttgggttcagtactgggtatgttcgtctttggcgcatcagcaggcggaagtacaccatccggggcatacagttcagcggcgctgtcggtcattccaaatgcggacggcggcgtgtaccgctcagcaggactcagtcagtacagcggcagtattgttaacagaccgacgttctttgcatttgccagaggggcggcagtaatgggagaggccggtccggaggctatactgccgcttcgtcgcggtactgacggtaagctgggggttgtggcagcaggttccggagggatggcgatgtttgcaccgcagtatcatattgcaatcagcaacacggggccggaactgacgccgcaggcgctgaaggcggtttatgatctgggtaaaaaggcggcggctgatttcgtgcagcagcaggggcgtgacggcggcaggctgagcggggcatatcgatgatgaaaacctttcactggaaagttgacccggacatgggggtggattcggaaccacaggtgtcggtggtgaggttcggtgatggctacgagcagcggcgtgcatccgggatcaataatgacctgaaaaaatacagtgtgactatccgcgttgaccgggaggatggtccgggactggagggctttttgtcacagcataacggtgtgaaggcgtttttgtggactccgccttacggataccggcagattaaggttgtctgccggaaatggagtgtgaaagcgggattgctgaaaacaacattcaccgcgacatttgagcaggttatttcttagtatttttgatcgaaacgatcgataaatatgattgaactttctaacctgctgctgtttcactgagcccgcacagtcaataatcaaaaaaaggaaatgttatgaaaaagattgtcgtggcggttttagttggtctggcgttaggtagcatcggcgtggctaacgcagcagggtataaaaataccgtttcaattggatatgcctacacagatttaagcggctggctttccggtaatgcgaacggtgccaacatcaaatataactgggaagatctggacagtggattcggggcgatgggttcagttacatacacctcggctgatgttaataactatgggtataaggtaggtgatgctgattatacctcccttcttgttggtccttcataccgttttaacgactatctgaatgcttacgtgatgattggtgcagcaaacggacatattaaggataactggggaaattctgacaataaaaccgcctttgcttatggggcaggtattcagcttaacccggttgaaaatattgccgttaatgcgtcttatgagcatacaagtttttccactgatgctgacagtgacgtcaaagctggaacctaggtgcttggcgtaggttacagcttctgacctttaacatcgatacagatttaatgccctccagtgagagggcttttttatgggtaaaacgaaattatgacgatatggctatgttgctgttatttctcaatgacaccacaggcaaaacgtgcaccgccaccacccagtggagcaggtttatcggagtaattgtcaccgcctttatggatcatcaatgagtgacctttcagttctgacagtgatttaaggcgtggtgccagtaacggatacgtggctgtaccatctgcattgacaaccagtccaggcagatcccccaaatgccctttgtcattatatgggccaagatgtttcccggttttttcggggtcaagatgtcctccggccatgagcgccggaacctctttaccgtctttcattcccggcatacaacttgggtttgtgtggacatggaagccgtgaattcctggcgtaagaccatttaggtgaggagtgaaaagcagaccgtaaggtgtctctgaaactgtgatttcacctatgttttctcctgttccgctggacagggcatcgttcatctttacagtcagggtattctctgccattgctgaacaactgatgagcgcaccagctaccagcgacaatattgtgtatttcattagttacctcgttttttggttgtatcgtaaataccattaataaaagcaggtatatgtttgcaagataaataataaaggatctctcatatatgcaggatataccacaggaaaccctgagcgagaccaccaaagcggagcagtccgcgaaggtggatttgtgggaatttgatttaaccgcgattggcggtgagcgctttttcttctgtaacgaaccgaacgaaaaaggcgagccgttaacctggcaggggaggcagtacgaaccgtacccgatacaggtacaggattttgagatgaacgggaaaggcgcatctccccgcccgaacctcgttgttgccaatctctttggtctggtcacggggatggcggaggatttgcaaagtctcgtcggcgcgtcagtggtaaggcatcaggtttacagcaagtttcttgatgcggtgaatttcagtaacggcaatccggacgctgacccggagcaggaggcggtagcgcgctataacgtggagcagttgtcagaactggattcatcaactgctaccattattctggcatcaccggcagaaaccgacggttctgtggtgccggggcgtaccatgctggcggactcctgtccgtgggattaccgggatgaaaactgcggatacgacggcccgcccgtggccgatgagttcgataagcccacctcagacccgaaaaaggataaatgcagccactgcatgaaaggctgtgaaatgcgtaacaatctggtgaatgccggatttttcgcttccatcaacaaactgtcttaacaggttcccatgattaacgatgacattctggcacatgcccgacagtgtgcgcctgcggaatcgtgcggttatgtggtcagaacggcacagggagagcggtattttccgtgtgaaaatctgtctgctgaacccacgatgtattttcgtatatccccggaggattacctgaatgcccggaaccgcggcgacatcgtggcgctggtacacagccatcctgacggtaagccctgtctcagcagtgcggatcgtaccctccagatacaaagcgggctggactggtggctggtctgtgataacaggatacataaattccgctgcgtgccacacctgaccgggcggcagtttgagcatggcgtgacggactgctacacgctgtttcgtgatgcctaccatctggccgggattgatatgccggatttcgatagggaagatgactggtggagtcagggtaaaagcctctatctggatcacctggaggcggcgggattttaccgggtgaatccggaggatgcgcagcccggcgacgtgctgatttgctgttttggttcaccgacgcccaatcatgcggcgatttactgcggcaacggtgaactgttgcaccatattccggagcagttgagtaaacgagaggggtataacgacaaatggcaacgacggacacactcaatatggcggcaccggcaatggtgcgaatctgcctttacggggatttacaacgatttggaaagcgcatcagcctcagcataaagacagcggcggaaggcatacatgcgctggcgatacaactccccggattccggcagcgaatgaatgagggctggtatcaggtccggattgccgggagcgatatggcgccggatacccttactgccagactgaacgaatcgttaccgccgggggcagtggttcatattgtaccgcgtatggcgggagcgaaaaacggtatctggcaggtggtagccggggcagcgctgattggcgcgtcatttattcccggtctgaatgctgtagcggcggcagtattgttttccgcaggaaccagtatggcgctgggtggtgtggcgcagatgctgacacctgtacccaaaacaccgacggtgggtcaggcagataacgggaaacagaacacgtacttttcttccctggaaaatatggtggcccaggggaacccggtgccggtgttgtacggtgaaatgaaaatcgggtcacgggtgatatcgcagatgatgagtacccgggatgagagcacgtcgggaaaagttgtggtgatcggctccccgttacaggcaaacaccacgtcgcggcaggacggcgggattaccagaccgtctgtcgtcatccggcagtgataatcatgacaacatgagctgatacacatgaccgccattacggcggttttgttatttatggagccaggagaatgagcaaaggtggagggaaggggcatacaccacgtgaggcgaaggacgatctgaagtccacacaacaactgagcgtgattgatgccctcagtgagggaccgatagtcggcccggtgaacggtctgcagagcgtgctgattaataacacgccggtggtggacgcggacggtaacagtaatattcacggcgtgaccgtggtatatcaggtgggggagacaccacaggcaccgctggaaggttttgaggcttccggcgcggaaacggtgctgggtgtggaagtgaaacacgataatcccgttacccgtactgttgtctcagagaatgtcgaccggctacgcttcacctttggtgtacagatgctgcaggagaccacggacaagggggaccgtaacccgtcctccgtgaatctgctgatacagtttcagcgtagcgggatctggaacacagaatttgatatcactattaacggcaagatcacaacacaatatctggcatcggtagtggctgataatttaccgccgcgcccgttcagtgtccgcatggtcagggtgacaccggacagcaccaccgacaggcttcagaacaaaacgctgtggtcgtcgtatacggaaatcatcgatatccggcagggttatcctggcacagcggttgccggtctgctggtggatgcggaacagttcggcagccagcaggtcacgcgtaactaccacctgcgcggacgtatttttcaggtcccctcaaactatgacccggatacccgcacatataccggcctgtgggacggggcgtttaaaccggcgtacacgaataacccggcgtggtgcacgatggataaactgacccacccccgttacgggctgggcaggcgtatcgggggggcggatgtggataaatgggcgctgtacgccatcgcgcagtactgcgatcaaccggtgccggacggatttggcggcacggaaccccgcatgacgcttaatgcgtatattaccacccagcgtaaggcgtatgacgttctggcggatttctgctcggtgatgcgttgtatgccggtatggaatggccgcaaaatgaccttcatccaggaccgcccctccgataaagcatggacctacaccaacggtaacgtggtgggcgggcgctttaaatacagcttcagtgccctgaaagaccgccataacgcggtagaagtgagatacaccgatccgctgaatggctggcaaacctccacggagctggtggaagaccatgcctcacaggcccgttatggacgcaatctgctgaaaatggacgcgttcggctgtacctcacgtggacaggcgcaccggacggggttgtgggtgatgatgacggagctgctggaaacgcagaccgtggatttttctgtcggtgcggaaggtctgcgtcatacaccgggcgatattattgaggtctgcgacaacgattacgccggggcgtcggtcggtgggcgtatcactgacctggatatttccacccgcacgctgacgcttgaccgggaaataacactaccggaaagcggcgccaccacgctgaatattgtcgggcctgacggtaagccgttcagtacggagattcagtcgcagcccgcaccggatcgggtggtaacgaaagtcctgccggaaaccgtgcagccatacagtatctgggggctgaaactgccctccctgaagcgccgccttttccgttgcgtgcgtattaaggagaatgacgacggcacatacgctatcactgccttgcagcacgttccggaaaaagagtccatcgtggacaacggggcgcactttgacccgttaccggggaccaccaacagcattattccgcccgctgtgcagcatctgacagtcagcacggataacgacagtaccctgtatcaggccaaagcgaagtggggcacgccgcgggtggtaaaagatgtgcgttttgtggtgaggctgaccacaggcagtgggaacgagggcgatccggttcgtctggtgacaacggcgacgaccagcgaaacggagtacgccttccacgaactgccactgggtgactacacgctgacagtcagggcaataaacggttacgggcagcagggtgaaccggcgtccgtggcattcagtattcaggcaccggaagcgccatccacgattgagatgacgccgggttattttcagataacggtgacgccgcaccagactgtctacgatgccagtgtgcagtatgagttctggtactccgccacgcaactggcgactgccgccgatattcagtcaaaagcacagtatctgggcgtcgggtcattctggataaaggatggactgaaaccactgcatgatgcctggttttacgtgcgcagtgtaaatctggctggaaaatcagtatttgcggaagcatccggacgtccgggggatgacgcgaaagggtatctggatttttttaagggactgattacggagacgtatcttggtacggagttgctgaaaaaaattgacctgacggagaataacgccagcaaactgcaacaattttcgaaggagtggcaggacgctaacgataaatggagcgccacgtggggcgtcaaaatagagcagaccaaagacggcaaatattatgtggccggacttggactgagcatggaagacacgcctgacgggaagataagccagttcctggtggcggcggatcgcattgcttatattaacccggcaaacggaaacgagacgcccggattcgtcatgcagggcgaccagataatcatgaatgaggcgttcctgaaatacctgagcgcgccgaccattaccagtggcgggaatcctccggcattttccctgacgccggatggaaagctgactgcgaaaaatgcggatatcagcggccatatcaacgctgtatctggctcgtttacgggagaaatcaatgccacctccggtaagttttctggcgtgatagaagcaagagagtttgtcggtgatatctgcggctcaaaagtcatgcagggcgtgagcatcagggcgacgaacgacgaacgcagcacctcaacacggtataccgacagcgccacctatcagatagggaaaaccatcacggtgatggctaactgtgagcgtaacggtggcaccggtgccatcacagtcacgataaatattaacggccaggtgaaaacggcggaggttatgccgtataccgcagggattccggccatgtatcagaccgtcgtcttttcggtctacaccacttcacctgtcgtggatatcagcgtctctctgagggtccgtgggcagtacaccacgtctgcttccgtctggccgctggtgatggtttcccggtcggggagcaacttcacaaactgaccggatttccggtccctttcgtttaatgaggaacaaatatgactatgtcgcgcgtaatttctctggcggcagggctttccctgtccgttttattttccactgctgccgttgccgataacggaagaggaagcggcaacagcaatattgaaaaccagacccggatttataccggcaccgaccgtgggcagaaacagcaccgcgaggcaaagggaaaaacaatcacgcggagcgtccagtgttctctgccggcatatttacgtgacccggataatcagtgctgagatgtgaatgaatctgaagcctgcctgcgggcgggcttttttatggaggcaatatgccagtacttatttccggcgtactgaaggatggtacgggaacgccggtacagaactgcaccattcagctgaaggcctgccggaccagtacgacggtggtcgtgaatacggtggcatcagaaaatccggatgacgccgggcgctacagcatggatgtggagcaggggcagtacactgtcacgctcctggtggacgggtatcccccgtcacatgccggagttattacggtttacgatgattcaaagccgggcaccctgaatgattttctgggggccatgacagaagacgacgtccgcccggaggcgctgcggcgttttgaggcgatggtggaagaagttgcccgccaggcatcggaggcatcgcggaatgccaccgccgcagggcaggcatctgaacaggcgcagacatcagcaggtcaggcatcggaaagcgccacggcagcagtgaatgcagccggagcggcagaagcatcagccacacaggcagcctcatccgcagcatctgcggagagcagcgcaggtacggcgaccacaaaagccggggaggcatcagccagcgcggcgtcggctgacacagccagaacggcggcagccgcatcggcagccgcagcgaaaacatctgaagcgaatgcagatgcctcccgtactgccgccggcgattcagctgctgccgcagccgccagcgcgacggcggcgcagacatcagcagagcgcgccggagcatccgaaaccgccgcgaagacgtcagaaacgcaggcggcttccagtgccggtgatgcaggtgcgtcagccactgcggcggcagcgtcggaaaaggcggcagccgcatcggcagccgcagcgaaaacatctgagacaaatgcagcaacgtcagcaagtacagcagcggccagcgcaacagccgcctcgtcatcagcatcggaggcatccactcacgccgccgcatctgataccagcgcatcactggcggcgcaaagcagtactgctgccggagcagcagccaccagagcagaagatgccgcaaaacgggcagaagatatcgcggacgtgatttccctggaagatgccagcctgacgaaaaaaggtatcgttaagttaagcagcgccacggacagtgacagcgaagcgctggcagccacgccaaaggcggtccatgctgtcatggacgaggtacagaccaaagcgccgctggacagtccggcactgactggtacgccaacagcaccaactccggaaaccgcagctgcaggtattgaaattgccacggcagcgtttgtggctgcgaaagtggcgcagttggttggttctgcgccggaaacgctggacacgctgaaagaactggctgacgcgctgggtaacgatccgaactttgccaccactgtactgaataaactggcgggcaagcagccgctggacgatacactgacggcgctgtcaggaaaaagcgttgacggtcttatcgaatacgttggtttacgggaaaccataaatcacgccgccgatgcattactaaaatcacagaacggtggcgatattccggaaaagccgctgtttgtacaaaatatcggagcgctccctgcatcaggtacggctgttgcagcgaacagactggcatcacgcggcgcgcttccggcactgactggtgcgacaagaggcagcgatagcggcctgataatgggcgaggtctacaacaatggctatccgacgcaatacggaaatattttacgtctgaccggaactggtgatggggaaatcctcattggctggagcgggacaaacggtgcgccagcgcccgcatatattcgcagtcatcgagataccgccgatgctgagtggtccgaatgggcgatgctctacacctcactaaatccgccaccgaattcgtatccagtaggtgcggcgatagcatggccgtctgatgctaccccagccggttacgccctgatgcaggggcaatcgtttgataaatctgcttacccgttactggctatagcgtatccgtccggcattatccctgacatgcggggctggacaataaagggtaagcccatcagtggacgtgctgtactgtcgcaagaaatggacggcaacaaatcgcacagtcacagcgccagagcgcaggatactgacttagggacaaaatctacctcatcctttgattacggcacgaaatcgaccaataccacgggcaatcatactcaccagttcggcggttatatcaattcatactggggagattccaatcacacctcatttcagcctggaggtggtgcatggacacaggccgctggcgaccatgcacatacagtttatatcggaggacatgagcacaccatgtatataggtccacacggacacgtcgttattgtggacgcagacggtaatgcggaaaccacggttaaaaacattgcatttaactacatagtgaggctggcataatgacttttaaaatgagcgaacaggcgcagacaattaaaattttcaatctgcgttcagatactaacgaatttattggtgcaggtgatgcgtatattccgccgcacacaggactaccggcaaactgtactgatatcgcccctcctgatattcccgccagtcatattgctatatttgacgctgaaacccagacatggagtttgcatgaggatcaccgcggcgagatggtttacgacacaacaaccggcaatcaggtttatatctccgctcctggtccgttgcccgaaaatgtcacatcagtttcaccaggtggtgaataccagaaatgggatggtaaggctaaggtctgggtaaaagacgaagcggctgaaaaagcagcgcagcttcgtcaggcggaagaaaccaaaagccgtcttttgcaaatggcatctgaaaaaatcgcgccattgcaggatgcagttgatcttggaatcgcaacagatgatgagaaagcgcggctcgacgaatggaaaaaatatagggtgctggtaaaccggatggatacagccgcccctgactggccggaaagaccagccagccagtaggcgttactgtggtaatgcaggccacctgattgctgtgaaggtggcctcatctgaaacacctgttaagtccagcgatttaagaacattgatataattcatcggcagaatcaaagctgctttattttcatcactgataatccccagcgttaattctatgcgccagtccttaatggcattatctgaatcgttaagtaatttctgccgggtgacttctgcctgccaaaattgaacgccgggcgttgataccggatgatctggtcatcgtggaaagcgaccctgaaaaaatcgacacttagctgtaaaatgacagtcccgccatccggtcatcataacggatttttcttctgcaccttctgaagcccgccatggcaggacgaccatgaatccgccgataaccttattgtgaaattaagaccaggaagagatgatgtctgtcggacagatactatatgtaaatttataaaggttttttgttatgccctttcatattggaagcggatgtcttcccgccatcatcagtaaccgccgcatttatcgtattgcctggtctgataccccccctgaaatgagttcctgggaaaaaatgaaggaatttttttgctcaacgcaccaggctgaagcgctggagtgcatctggacgatttgtcacccgccggccggaacgacgcgggaggatgtggtcagcagatttgaactgctcaggacgctcgcgtatgacggatgggaggaaaacattcattccggcctgcacggggaaaactacttctgtattctggatgaagacagtcaggagatattatcagtcaccctggatgacgtcgggaactataccgtaaattgccaggggtacagtgaaacacatcacttaaccatggcaacagaaccgggagtggaacgcacagatataacttacaacctaaccagtgatattgatgctgcggcctatctggaggaattgaaacagaatccaattataaataataaaataatgaatccggtagggcagtgtgagtcattaatgactcctgtaagcaattttatgaatgaaaaagggttcgataatattcgttatcgaggtatatttatctgggataaaccaacagaggaaataccaacaaatcattttgcagtggttggaaataaagaaggaaaagactatgtgtttgatgtttcagcccatcagtttgaaaatagaggtatgagtaatctgaatggcccattaattctttcagcagatgaatgggtttgtaaatatagaatggcaacaagaaggaaacttatttattatactgattttagtaattcaagtatagcagctaatgcctatgatgcattaccacgagaattagaatcagaatctatggcagggaaagtttttgttacatcaccgagatggtttaatacctttaaaaagcaaaaatattccttaataggtaaaatgtaagcgcaccgtggaggacgtctgtcagaaccctgtcaatccggcgatgatagtgtccacttaaattttgatggacactatcacagatgacagagtccacagcccggcgcaaacacggctgtcggtcaggaaagagaaaagccagtcgctgtacgactggatacaggcgcagttgaaaacattgtcggtgcatgcggagatggcgaaggagttcggttacatgctgaagcagtgtgatgcgttgagcgtgtcctctgctgcgacggtcgggtggagatcgacaacaacatctgtgaaaacgccttacggtgcgtggcgctgggccgacgtaactatctgttcttcggctcagacagtagcggcgaggcagcggcgatcatctatagcctgctgggtacgtgcaaactaaacgacgtggagtccgaggcatggttacgcgacgtgctgtggaaaatcagcgactggtcatcgaaccgggtgcacgaactgctgccctggaacctcgaaaccgtaaaataatccttacgctacgtcctaaacgggacgcttactgagttatgagggtgaggtggttttcttgatgagcatctgaacgccggtttgtgggatagggcaggtgggacggattcgggacagtcatccgtttttaactattggcatggattggtatcttttcgcatcatgggacgtgtgagcgcaggtatgacgcggtatgttattgacttagaatgtggttccaggaactggcgcatccatacccgagcagtttccggtgtcagtgccagcgggcgacgatcgtgaatgtctaccagacctttatcggctgcggaggtaacaatcagaaatccctctgcttcatcaccgcgctcaaacggcgtactgccaatggcagccatgaatatcggcttcccgtcctttctgtgaatgaaatacggctgttttttgtcgccttccttcttccactcgaaccatctatcggcaaaacagatagcccggccatgctgccatagtggcttaaacattctgctggaggccgctgtcgcgacacgggcgttaataagtggagctttatcccaccatccgggagcgtaaccccaaatcaccgggtcgagatgtaattgctcgtcgcgttcgctcaatagcaggactttagtcccgggcgccacgttataccggcctataggctgagggtcataagcaatattacgatcggcttcgtcggccagatatgccagatattcttcacgggtctgtgcttgtgcaaagcgtccacacatatgaaaccgccagtcgtcaggctgaaagtatagggcagggggaaaatgtggcgcgctccggtaatgatttacagggaatttatacagtaattcgaaatgaaaatttgtgtattgatgaattccgaaactgagcagtgagcaaactgatgaatcaatcgcaaattgcgtcgaatctcgacggctttattccccagtttcaccccatagcttccccgtaggaaattgagccataaaaaaaacagccctgacaggctggtttttaaggggaattttggtcggcacgagaggatttgaacctccgcccccccatgttggcggtagcctgaataattatcttggtaaaggttaactatcataaaatggtacaccagtctttccaggaggaggagtgtaaaggttttggctcataaacaccgtcatagtaaagaccacaaatactgcaatcttcatttttatatttatcattgaatgctaaggtaagcttgtcatagacatcaatatttgattgccattcaggtgaggtattcattgaatcataaattaatacttttttcacttcactatcatagcctacaatgcactctgcatgtagacattccgagccaagtgaaggcctgatcaacatcagtggtccatggttttgtaattcgtaagaaataaaactctcaaagtcatcttctacagtactattgaaaacttctgcctgtaaagcttctttaatgtttgtaaaaagagaggattcaggtattttttgcacattcatttcttttaataaattctcacattctattatatcaataccctctaatatattattaaacgcttgattatcagaagtgatgtcctctaatgcactataattattgccatctctggatttgataacatttaatgagcaaacccagcaattattgtagagggtgttgcctgtggtatcaaactggctttgaaagttacgatggtgaataatctgaccctgaggagttgctgtattacttctgtaaacgctgcctaaactattttgaatgtgtcttaacataatatactcgccgaatagtaattttgttaatgtaattatatactacagtgtggatattaatacaattcttttgttgttaattattatttatgaaattaattaaaagtgaataagttagaggtgtttgttggccttaaaattacatttgttgagggggcttatatgatatgtttttattgtattgtcgcatttttcttaagctgaatccggattttggggaggtggctaaatgtaaatgacgtggtttaagataaatctatttttaataagctatctgttcaaattttcgcgatcgcttttgttggtatcactattcaagcagtttgcctgcatcggcttcaccctcacttcggcatcagggaaaatctggtgcacctgcttcgtcagttcggccagaatgatctcgctggccccttcgagtccttcaacattacgcttgtcataaaccagttctacgaacatacgtgtttcgctaataactgtttgtatatacagtatttttgctttggcggttttgtctgtcaaggcatgaaccacttgtttttaaattttggggaacatactgcgggcgtgtttgttatcgattttccctgcagggctgatggggtctggcgttgactaaaattatgtgtggggcatggatggggcaaaagtggtctgtgaagttcgttaaagttcgttaatcaagcttcatctcgatctcgctcatcccttgtttaaagcgctcctggacgatctttatcgattttaaaaactatgagtacatattataaaaatgtagcaaataggccatttgtgcctgaaaagatgaacattctgcgtagcgcgatttgcgcaacaggaatagactggagtcgacactctacacaaagatgcgaaaggttttttatgacacaacagccacaagccaaataccgccatgactatcgcgcgccggattaccagattactgatattgacttgacctttgacctcgatgccgaaaaaaccgtggtcaccgcaataagccaggctgttcgtcatggcgcgcctgatgcgcctcttcgccttgatggggaagatttaacgctggtatctatccacgtcaacgatgcgccgtggacagcatataaagaagaagagggcgcgcttgtcatcagcgacctgccagagcgttttacgttacgcattgtcaacgagataagtccggcggcgaatacggcgctggaaggattgtaccagtcaggcgatgcgctctgtacccagtgtgaagcggagggcttccgccatattacctggtatcttgaccgcccggacgtactggcgcgatttaccaccaaaattattgccgataaaagcaaatatccgttcctgctctccaatggcaaccgtgttgcacagggcgagctggagaatggccgtcactgggttcagtggcaagatccgttcccgaaaccgtgttatctgtttgcgctggtggccggtgattttgacgtgctgcgcgatacctttaccacccgctccgggcgtgaagtcgcattagaactgtacgttgaccgtggcaatctggatcgtgcgccgtgggcaatgacctcgctgaaaaattccatgaaatgggatgaagcgcgttttgggctcgaatatgacctcgacatctatatgattgtcgcggtggatttctttaatatgggcgcgatggagaataaaggtctcaatatctttaactccaaatacgtgctggcgcgaaccgataccgcgacggataaagattatctcgatattgagcgcgtgataggccatgagtatttccacaactggaccggcaaccgcgtcacctgccgcgactggttccagttgagcctgaaagaggggctaaccgtgttccgcgatcaggagtttagctctgatttggggtcacgcgcggtgaaccgcatcagtaacgtgcgtaccatgcgcggtttacaattcgcggaagacgccagcccgatggcgcatcctatccgcccggataaagtaatcgaaatgaataacttctacaccctcaccgtttatgaaaagggcgcggaagtcattcgcatgatccacacgttgctgggtgaggaaaatttccagaaggggatgcagctttattttgagcgccatgacggcagcgccgcgacgtgtgatgacttcgtacaggcgatggaagatgcttctaatgtcgatttgtcccatttccgccgctggtacagtcagtccggcacgccgattgtaacggtaaaagatgattataatccggaaaccgagcagtacacgttgaccatcagccagcgcactccggcgacggcggatcaggcggagaagcagccgctgcatattccattcgccatcgaactgtacgataacgaaggcaacgtcattccgttgcaaaaaggcggtcacccggtcaacgccgtgctgaacgtcacgcaggcggagcagacatttaccttcgataatgtttacttccagcctgttccggccttgctgtgcgagttttcagcgccggtgaagctggaatataaatggagcgatcagcagttgacgttcctgatgcgccatgcgcgcaatgatttctcccgttgggatgcggcgcaaagcctgctggccacatacattaaactgaatgtggcgcgtcatcagcaggggcaaccgctatcgcttccggtgcatgtcgctgatgcgttccgcgcagtactgttggatgagaaaatcgatccggcgttggccgcagaaattttaacgctgccttcggccaatgaaattgcggagctgtttgaggtcattgacccgatcgccattgcgcaagttcgtgaagcgctaacgcgtacgctggcggcagaactggcggatgagttcctggctatctataacgccaatcatctggatgagtatcgtgttgatcacggcgatatcggtaagcgcacgctgcgcaatgcttgcctgcgcttcctggcgtttggcgagacggagctggctaatacgctggtcagcaaacagtatcgcgacgccaataatatgaccgatgcgctggcggccctgtctgctgctgtggcggcgcagttgccgtgccgcgatacgctgatgcaggagtatgacgataagtggcatcaggacggcctggtgatggataaatggtttatcctgcaatccacaagcccggcggaaaatgtactggaaaccgtacgcggcctgctcaaacaccgttctttcagtatgagcaacccgaaccgcatccgttcattaattggcgcgtttgctggcagcaacccggcggcgttccatgcgcaagacggtagcggataccagttcctggtcgagatgctgaccgatctgaatagccgtaacccgcaggtagcatctcgcctcattgaaccgctgattcgtctgaaacgttatgatgataagcgtcaggagaaaatgcgtgcggcgctggagcagttaaaaggactggagaatctttccggcgatctgtacgagaagataactaaagcgttagcctgacagtatccgttataaagaggtaagacatgcccggtaagcgttagcgctgccgggcatttttttgccggacgatgacgcttcctggcgaaacgtgaagtgagaatgaaggaaaacgattgctatttattgccgtaggtcaattcccttttgccttgttatcgcccataatacgcccccggtttgcacaccgggaatccaggagagttcatgtactatcccttcgttcgtaaagcccttttccagctcgatccagagcgcgctcatgaatttacatttcaacaattacgccgcattacaggtacgccgctggaagcgctggtgcgccagaaagtaccgacaaagccggttacctgcatgggacttacctttaaaaatccactggggctggctgccggtctggataaagacggggagtgcatcgacgcgttaggcgcgatggggtttggctccctggaaatcggcaccgtgacgccgcgcccacagccgggtaacgataagccgcgtctttttcgtctggtggatgctgaaggtctgatcaatcggatgggctttaataatctgggcgtcgataacctggtcgagaatgttaaaaaagcccattttgatggtattctgggaattaacatcggtaaaaataaagatacgcctgtcgaaaatggcaaagatgactacctgatttgtatggaaaaagtctatgcttatgcgggttatatcgccattaatatttcttcgccgaatacgccagggctacgtacgctccagtatggcgatgcgctggacgatctgttaactgccattaaaaataagcaaaacgatcttcaggcgatccaccataaatatgtgccggtggcagtaaagatcgcgccggatctttgtgaagaagaattgatccaggttgccgatagcctgcttcgtcataatattgatggggtgattgcgacaaataccaccctcgatcgttctctggtacaaggaatgaaaaattgccagcaaacggggggattaagtggccggccattacaattaaaaagcacagaaattattcgccgtttatcccaggagttaaagggacaattgcctattatcggcgtcggcggcattgactcagttatcgccgcgcgcgagaagatagcggcaggagctacgctggtacaaatttattccggctttatttttaaaggcccgccattgattaaagaaatcgtaacgcacatctaaactttaccctttatcagacaaccagggctttatttccggcgctggttgttttatatttctccactgttgcttatttagacattttaggcttttattattggggtaataaacgaagcggcaaaaggacaatgctgttacgagttgcttaaaagcgggagagaggtaatgcgaattaaacctgacgataactggcgctggtattatgatgaagagcacgatcgtatgatgctcgatctcgccaatggtatgctttttcgctcgcgcttctctcgtaaaatgcttacgccggacgcgttttgcccgaccggtttttgtgtggatgatgccgcgctctatttttcctttgaagaaaaatgccgggatttcgaattaaccaaagagcaacgcgcggagctggtattgaatgcgctggtggcgattcgctatctcaaaccgcagatgccgaaaagctggcattttgtagcgcatggcgaaatgtggaccccgggaacgggcgatgccgcaagcgtctggttaagcgatacggcggaacaggttaatttgctggtcgttgagccgggagaaaatgccgcgttgtgtctgctggcacagccgggcgtggtgatagcaggccgaaccatgcagcttggcgatgcgattaaaattatgaacgacaggctgaaaccgcaggttcactgtcacagtttcagccttgaacaagcggtttaattttccagtcgtaacgcggtcttaggcacgcagctacagctcagaatcgtaccatcgtcacccatagccgattttttcagcggacttacttcgccttccagcaaacgtatccggcagcaaccacagataccagcccggcaagaatacggaatacgaatcccctgattctccaactgttccagtagtacctgttgattattcccgcagaaggtttgcccctgccagtcgatggttacactcgcgtccgggtgtttctctggcgtaacgctgttgtcgaccgttgtggcgccataagcttttgccggggctgtcgccagaatctccacctcatcgccgacgcgaatgacgccgctattgcgggcaatcagattctgaccgaaatccacatcgccattgtccagggcggtacgaaaagcttgcagtgtcgccagcggttctccggaaggatgtttttgccccttttcagggctgacggtcgtaaaaatacagcggctacagggcttcacgacgtcaaaaatcacatcgccaatgcgaagcactttccagctatcttcctcccaggccgctacgccggaaaccactaagtttgggcgaaattgttccatttgtacgcctgccggacaacgctgttgcagatcgcgcagcgaggcttcgttggtcaataaatacgggtagccatcggcaaatcccagcggcaccgcgttatgtcgtttgacccggcgtgtcaactgcggcccaacccagcgcaactggacatcgcgggagaaaaagccgctcaaccattgattaatcgccgtcggggcgacgcgagcggtaaaatggtttccccagacctcggtcggcgcatcctgcggggtgaaatccgtaaagcgaaccagcgcgctactgccgtctggcgcggtcaaatgaaggccgtcgtgtaagggagagggggtaaaacgtaccatttgtggaaactggcgggcggtaataaatgtgccgtcaggctcggtcaccatgaagatgcgatcaaaagccaggccgctgatatctgccagcgcatgagtcaggccaatgccgcgcatggatttgaccggatgaataaagagccgtgataacgtcgccaccgtacagtccctcaaatgaaaataagccttcaactttatgacatgggcgtgagattagctataatgcgcaacaattttcttagcgtaaaagtgacaatatgaattctctgtttgccagtacggcccgcgggctggaagagctgttaaaaactgaactggaaaaactgggcgccgtagggtgtcaggttgttcagggtggggtccattttcagggcgacacgcggcttatttaccagagcctgatgtggagccgcctggcctcgcgtattatcctgccgatgggtgagtgcaaggtctacagcgatctcgatctttacctcggcgttcaggcgataaactggacagagatttttaatcctggcgcgacgtttgcggtgcatttcagcggcctgaacgacaccatccgtaatagtcagtatggcgcgatgaaagttaaagacgcgattgtcgatgcgtttacgcggaaaaatcttccgcgtccaaatgtggaccgcgaatcgccggacctccgtattaacgtctggctgaataaagaaactgccagcattgcgctggatctcagtggtgatggcctgcacctgcgcggttatcgcgatcgcaccgggctggcgccaattaaagagacgctggcggcagcgattgttatgcgttccggctggcaaccaggtacgccgctgctcgaccctatgtgtggttcggggacactgttgattgaggccgcgatgtgggcgaccgatcgcgcgccgggcctgcaccgtggtcactggggatttagcggctgggcacagcatgacgaaactatctggcaggaagtgaaagccgaagcgcagacccgggcgcgtaaggggctggcggagtattcctctcatttctacggttccgacagcgatgcgcgcgtcattgagcgggcgcgcagcaacgcccgtcgcgccggtatcggcgagcttatcacctttgaagtgaaagatgtggcgcaactgagtaatccattgccgaaaggcccgtatggtacggtgatcagtaacccgccttacggcgaacgtctggacagcgaaccggcgctgattgcgttgcacagcctgctgggccgtaccatgaaaaatcagtttggcggctggaacctgtcgctgttcagcgcttcgcccgatctgctgggcagcctgcaattacgtgccgacaaacagtttaaagccaagaatggcccgctggactgcgtgcagaaaaactatcatattgcggaaaccacggcggacagtaaaccggcgacggtggcggaagattacgctaatcgcctgcgtaaaaatcttaaaaagctggagaaatgggcgcgccaggaagggattgaatgctatcgcttgtatgatgccgacctgccggaatataacgtggcggtagaccgttacggcgactgggcggtgattcaggaatatgcgccgccgaaaacggtggatgcgcaaaaagcgcggcaacgtctgttcgatattattgcggcaaccttgtcagtgctcggtattccgccgaataaactggtgttaaaaacccgtgaacggcaaaaaggaaaaaaccagtatcagaaaatgagcgagaagggcgagttccttgaggtcagcgaatataatgcgcgcttatgggtaaatctgacggattatctcgacaccggtctgttcctcgatcaccgtattgcccgcagaatgctgggagaaatgagcaaaggcaaagatttcctgaatctcttttcttataccggcagcgccagcgtacatgcgggtctgggcggcgcgcgcagcaccacaacggtggatatgtcccgcacctatctggagtgggccgaacgtaatttgcgtctgaacggactgagcggccgcgcgcatcgcctgattcaggccgactgcctgggctggctgcgcgaggcgaatgaacagttcgatttgatctttatcgatccgccgacgttctctaactcaaaacgtatggaagagtcgtttgatgttcagcgcgatcatgtcgcgttaatgaaagatttaaaacgcctgctgcgtaaaggcggcaccatcatgttctcaaataataagcgcggattccgtatggatctggaagggctggcggaactggggcttaccgcacaagaaattacgcaaaaaacgctctccccggattttgcccgtaaccgtcagattcataactgctggctgatccgcgccgcctgaaaggaaaagtaaatgtcattaatcagtatgcatggcgcatggctgtcgttcagcgacgcgccgcttctcgataacgcagagttgcatatcgaagataacgaacgcgtctgtctggtggggcgtaacggcgccgggaaatccaccttgatgaagatcctcaaccgcgaacagggtctggacgatgggcgtattatttatgagcaggatctgatcgtcgcgcgtctgcaacaggacccgccccgtaatattgcgggcagcgtctatgactttgtcgccgaaggtatcgaagaacaagcggaatacctcaagcgctatcatgagatttcccgtctggtgatgaccgatcccagcgagaaaaacctcaatgaaatggcgcgcgtacaggaacagctcgatcatcataatctgtggcagctggaaaaccgtattaatgaagtgctggcgcagcttggactcgatcctaacgccgcgctgtcgtcgctctccggcggctggctgcgtaaagccgcgctgggtcgggcgctggtcagcaatccgcgcgtattgttactggatgaaccgactaaccatctggatatcgaaactatcgactggctggaagggtttctgaaaacctttaacggaacgattatttttatctctcacgatcgttcgtttattcgcaatatggcaacccgcattgtcgatctcgatcgtggcaaactggtcacctatccgggaaattacgatcaatacctgctggagaaagaagaagcgctgcgcgtagaagaattacaaaacgcggaatttgatcgcaaactggcgcaggaagaagtctggattcgccagggtatcaaggcgcgccgcacccgtaatgaagggcgcgtgcgggcgttaaaagcgatgcgtcgtgaacgcagcgagcgccgggaagtgatgggcacggcgaagatgcaggtcgaagaggcgacgcgctccggtaaaatcgtttttgagatggaaaacgtcgattaccaggtagaaggaaaacaactggtaaaagatttctccgctcaggtacagcgcggcgacaagattgcgttaattggcccgaacggctgcggtaaaaccacgctactgaaactgatgctgggacagcttcaggctgacagcgggcgcatccacgtaggaacgaagctggaagtcgcctacttcgatcagcatcgcgccgaactggatccggaaaaaaccgtgatggataaccttgcggaaggcaagcaagaggtgatggtaaacggtaagccgcgccatgtactgggctatttgcaggacttcctgtttcaccccaaacgggcgatgacacccgtccgtgcgctttccggcggcgaacgtaaccgtctgctgctggcacgactgttcctcaagccgagcaatcttttaattctcgatgaaccaacgaacgatcttgacgtcgaaacgctggaactattagaagaattaattgatggctatcagggcacggtactactggtcagccacgatcggcaatttgtcgataataccgtgacggaatgctggattttcgagggcggcggcaaaatcggacgttatatcggcggctaccatgatgcgcgtgcgcagcaagagcagcatctggcgacgaaacagccgatggcgaaaaaaaatgaggaagttattgcccctaaagcagaaattgtaaaacgtggcagtagcaaactaagctataaactgcagcgcgagctggagcagttacccggtcagcttgaagacctggaagcgaagctggaagcgctacaggcgcaggttgcggatgcggccttttttagccaaccccatgagcaaacgcaaaaagttctggccgatttaagtcaggcggagcaagaacttgagcaagccttcgaacgttgggagtatcttgaaggcctgaaaaacggggcataacgaaaggagcgcctatgtgtgaacatcaccatgctgcgaagcacatattgtgcccgcaatgtgacatgctggtggctttaccccgcctctcgcatgggcaaaaagcagcatgtccacgatgcggcgcaacgttaacgaccgagtgggacgcgccccggcagcgtcctaccgcctatgcgttagcggcactatttatgttgctgctttctaacctttttcccttcgtgaatatgaatgtcgcgggcgtcaccagcgaagtcacgcttctggaaatccccggcgtcatgttttctgaagattacgccagcctcggcacgttctttttattatttgtccaactggtgccggcattttgcctggtgaccattctattacttgtcaaccgcgccagtctgccgttgtcggtaaaaaaaacgctggcaaggatctttttcctcctcaaatcgtggggaatggcagaaatatttctcgccggggtgttggtcagttttgttaagctgatggcttacggcgatatcggcatcggcagcagctttattccctggtgcttattttgtctcgttcaactgcgggcgttccagtgtatcgatcgccgctggttgtgggatgatatcgccccgcagcctgcactggcgcagccgttaacgccggggattaccggtatccggcagtctttgcgttcttgcgcctgctgtacggcgatcctgcctgcggagagtctcgtctgtccgcgttgccatacgaaaggctatgtccggcgtaaaaacagtttgcagtggacgctggcgttattatttacctcgatcatgctttatctgcccgccaatattttgccgattatgattaccgacttactgggctcgaaaatgccgtcgaccattctggctggcgtgattttgctgtggagcgaggggtcttatccggtggcggcggttatctttctcgccagtattatggtgccgacgctaaaaatgatcgccattgcctggctttgttgggatgcgaaaggccacggtaagcgcgacagtgaacggatgcattttatttatgaagtagtggagtttgtggggcgctggtcaatgattgatgtctttgtcattgccgtactctctgcgctggtgcgtatgggagggttaatgaatatttatcctgcgatgggtgcgttgatgtttgctttagtcgtcataatgacaatgttttctgcgatgacctttgatccgcgtctgtcgtgggatcgtgagtacgaaccaggccatgaggagtcctgatagcatggaacctaaaaaaggggaagccaaagtacaaaaggtgaaaaattggtcgcctgtctggatattcccgattgttactgcgcttatcggagcctggattctgttttatcactacagccaccagggaccggaagttaccttaatcaccaccaatgcggaaggcattgaaggcggaaaaacgacgatcaaaagtcgcagcgtggatgtcggcgtggttgaaagcgcgacgctgactgacgatctgacccacgtacaaatcaaagcgcggctccattccggtatggaaaagttgctgcataaagactcggtattttgggtggtaaaaccgcaggtggggcgtgaaggcatcagcgggcttgggacgctgctatcaggcgcgtatattgaactacaaccaggaagtaagggcagtcagccggaaagctatcagcttcttgactcaccgccgttggcgccgcccgatgccaaaggtattcgtgtgattctggacagcaaaaaaggccggtcagctcagtcctggcgatcccgttctgttccggggttatcgggtaggatccgttgaaaccagctctttcgatccgcaaaaacggacaatgagttatcagttgttcattaaggcgccaaacgatcgattggtcaccagtaatgtccgattctggaaagatagcggtatcgctgtggatctgacatcggcgggaatgcgcgtggaaatgggatcgttgacgacgttgtttggcggcggcgtgagttttgatgtgccggaaggacttgagcaggggcaacccgtcgccgaaaaaacggcgtttaatctctacgacgatcaaaaaagtattcaggattcgctgtacaccgatcatatcgattacctgatgttctttaaagattcggtgcgcggattacaacccggcgcgccgctggagttccgcggtattcgtctggggacggtaagcaaagtgcctttctttgcgtctaaaatgcgccaggtatttaacgacgattaccgtattcctgtgctggtgcgcattgaaccggagcgtctgaaagcgcaattgggagaaaatgcggatgttggcgcgcatttgacggaactgcttaagcgcggtttacgcgcttcgcttaaaaccggtaacctggtgaccggggcgctgtatgtcgatctggacttttatcctaaggagccgccgattaccgggctacgcgaatttgatggttatgaaattattcccaccgtcagcagcggtctggcgcaaattcaacagcgactggtggaaacgttggataagatcaacaacctgccgttgaatccgatgattgaacaagcgaccaatacgctgtctgaaagccagcgtactatgcgtcggctgcaaaccacgctggataatatgaacaagattacctccagtcagtcgatgcagcagcttccggcggatatgcaaacgacgttacgcgaacttaaccgcagtatgcaaggcttccagcctggatcggcggcgtataacaaaatggtggcggatatgcagcgtctcgatcaggtgcttcgtgagttacaaccggtgttgaaaactctgaacgagaagagcaacgcgctggtatttgaagcgaaggataaaaaagatcctgagcctaagagggcgaaacaatgaaaaaatggctagtcgtgataatggcgttctggctggcgtcatgtagctccggcggagagaataaaagctattatcagctcccgatagcgcaaagcggtgtgcaaagcaccgcaagccagggcaaccgtctcttatgggtagagcaggtttccgtacctgactatctggcaggtaacggcgtggtgtatcaaaccagtgatgttcagtatgtgattgccaataacaatctgtgggccagcccgctggaccagcaattacgtaacacgctggtggcgaatcttagcgcccggcttcctggctgggtcgtcgcttcccagccgttgggaaccacccaggatacgttaaacgttaccgtaaccggattccatggacgctacgatggtaaggttatcgtcagcggggagtggttattaaaccacaatggacagctgattaagcggcctttccatatcgaagccagtcagcagaaagatggctatgatgagatggtcaaagtactggcaagcgcatggagtcaggaagcagccgctatcgcagatgagataaagcgccttccctgagataaaaggaatgtaaatttaaccgcttcaggtcgtgcgcctgaggcggtttttttatttttgacgccggaaaaatagttgttatggctcacattttttgtacaaatgatttaccgtatagctcacaaatatgacattggtgtgaattttgcgcattgacgggcgatccatttagaggtattcgtgtagtgtgattgcacattttgtaatcactgttttcttttccaccagatacaaatatgagggaaacgaggcatgaagagacaaaaacgagatcgcctggaacgggcacatcaacgtggatatcaggccggcatcgccggacgatcaaaagaaatgtgtccctatcagacgctgaatcaacggtcatactggttgggaggttggcgacaagccatggaggacagggcggtaatggcctgattctgtctctttagaaaaagaaacctccgcagtgcggaggtttcgcctttatgggctttgcaagcatgataccgatagcgcggaatatcaattcaacacttagaacgcggaagtatcctggaacaaaccgactttcaaatcgtgtgcggtatagatcagacgaccatccaccagaacctcaccgtccgccaggcccatgatcaggcgacggtttacgatacgtttgaaatgaatacgataggtgactttcctggctgtcggcagaacctggccggtaaatttcacttcgcccacgcccagagcgcggcctttgccttcgccgcccaaccagcccaggtagaatcccaccaattgccacatagcatccagacccagacaaccgggcatcaccggatcgccgataaagtggcatccgaagaaccatagatccggattgatatccagctcggcttcgacatagcctttgtcgaaattgccgcccgtttcggtcatcttaacgacgcggtccatcatcagcatgttcggtgcagggagttgcggccctttagcgccaaacagttcaccacgaccagaggcaagaaggtcttcttttgtataggattcgcgtttatctaccatgttttatgtaaaccttattttattgaagcacgcaggatagctaacacgtgtacgctgaacaagtccgatcagttcggaataaaagcgttcagccaacgtaatggccacgggaaacgatgacggccttcctgttgcgtcgcctgcgcgatacgctcctggatagtctgcatcaacgtcgtttgaccttcgccatcccacaccagatttaacagtagcggtaaggcgtcggtcacgtcgtctaccgcccagatagtgaacttctcttctttaaccgcttgcagcagttcagatttaagactgagatggcggacattggcggcagggataatcacgccctgtttaccgtttaattcccgctgctcgcagatggcgaagaaaccttcaattttttcgtttagcccgcccaccggttgcgcgcgaccaaactgatcgaccgagccggtaatcgcaatattttgattcactggcacattggccagtgcgctgatgagcgcacataattccgccattgaggcgctatcgccatccacttcgctgtaggactgctcaaaggttaacgaggcagagaagggaatttgttgctccagctgcaactccgacatcaggaaggcctgcataatcatcattcccttagcgtggatatttccgccaagttcggccttgcgctcaatatcattaaattcgccatcgccgatatgcacaacacagctaattcgcgacggttcgccaaaggcgcgaggatgcccgggaaactcaatgacggaaagcgcattgatttgtccaacgcgttcgccttcggtttcaatcaggatctgctcttgcagaatctcatcctgcatccgttccgccagaaagccttctcgccattcgcgtcgggcaagcatcagactgagcgcttctgcgccgcaggtatcgccttcgcataaaggcgatgcctccttaaactggcgggctatccacagtgggcaaagaggcagcgtatcctgttcgccggtatagcgcacagcctcgcgtatcagagcgggccaggcatccggtgccgggggcggcaaattatcgcgtaaagcgatacgcgtcacccattgacaccacagggtcatagcttctgcgtccgctatctgtaaattgtcttcaaattcactgtagatagcctgttccgcgagctccggttccatctcctgaaaatcagccagtgattcacgttcgccaaccagaatcaccttcagtttgagcggcattgatggcacggagaccggtaatggacgcgactcgtcaaaggccacccagtcaaaacgctcgcggctaacgatggctttcagacgcatccatagtaacggctgcgccagaagggttcgtaaggaaataatcagcacgccgccgtttgcctgatgaaccagtcccggctgcagggtaatgtcgccgttatactgccgcaggcaaccaaagagctgttcggcttcgacccagtccgcgctgacgacttgtgtgacggtggcaaagttgtcttgcgcattctgcgcggcgcggtaatgaacagtatgcccggaaacgtcataatgtccgccggttaattgtccggcatcggtttgcagagcgcggacggcatctgaaagtaaagtgagatactcttgctcttcaggcgctttagtcagcataaaagaggatgatgcccacggctgtataagttgctcaagcgcaaattgcagtcgtggctgagtatcactgagtaaggtgtcgttttcgtcagtcgcgtgtggctgtgcaaatatctcctgatagctttcgctatccggaaccagatcacgccatgcaagtttcgtaatggtcaaagttgaggttttttagtctgttgtaaaaggggggattatagcctaacccgtcacgctgcacacgcggaaagcgaatgcaaagtaatatgaagacgtgtaaccattcacaggttcgagattcttttcttcagatggctaaaaaactgatattctgataacagttacacggtaacattgggatcacaatgaaatatcaacaacttgaaaatcttgaaagcggttggaaatggaaatatctggtgaaaaagcaccgcgaaggggagctgatcacccgctacgtggaagccagtgctgcccaggaagccgtcaatttgttgttggccctcgaaaatgaaccggtgcgggtaaatgtctggatagacaggcatatgaatcctgccttgcttaatcggatgaaacaaaccattcgggcaagacgcaaacgacacttcaatgcggaacatcagcatacgcgcaaaaaatctatcgatttagagtttatggtctggcagcgtctggcgggccttgcgcagcgacgcggtaaaacattatccgaaacgattgtgcaactgatagaagacgcggagcataaagagaaatatgccacgcaaatgaccacgttaaagcaggatttacaggcgttattaggcaagaagtaacgctgaaaggcgttgtcatccagaccagagcaaaaaaccccgcgacgcggggttttttatcagacggaaacttaagcctgcggctgagttaccacgtctttaacgcctttaacttcgatctctacgcgacgatccggagccaggcaatcgatcagggcagcgcgaggtttcacgttgtcacaggtgttgccggtaaccgggttagattcgcccataccacgtgcggagattttgtcagacggaatacctttggagatcaggtaatcaacaacagactgagcacgtttctcggacagaccctggttgtaagcgtcagaaccgatacggtcagtgaagcccagaacgacaacggaaccgtctttcggatccaggttgctcagctggctgtacagctgatccagagcctgctggccttccggcttcagggtagatttgttgaagttgaacagtacgtcagacttcagagtgaagtgcttggtctgtacttccggagccggagctggtgccggagctactaccggagcagcttcttgctggccgaaacggtaggaaacacctacgctcagcaggccgttgtccggacgggtgccgatggtgttggcatcaccgatgttgttagtccactggtattccagacgggttgcgatttcaggggtgatagcatactcgataccgcccgcgaataccggggaaacgccggtgtcgtggtctttagtagacgggccgccagggacgttagacttggtgtctgcacgccataccataccacccagacgggtataaacgtccagatcgtcagtgattggataacccagtttagcggtcaactgaacgccctgagctttataagcgccattgatgttgtcgcctttgtacggcatacggcctaaccagtcgtagcccatttcaaagccaacatacgggttaacctggtaaccaccaaaagcacctgcgcccagttggttttcatgagtcgggccatcattgtgaatgaagccggtgtcatggtactgagaccagcccagtttagcaccagcgtaccaggtgttatctttcggagcggcctgcgctacggtagcgaaaccagccagtgccactgcaatcgcgatagctgtctttttcattttttgcgcctcgttatcatccaaaatacgccatgaatatctccaacgagataacacggttaaatccttcaccgggggatctgctcaatagttactctaccgatatctacggcttatgctgagcacccctggcgatgtaaagtctacaacgtagttggaaacttacaagtgtgaactccgtcagacatgtgaaaaaaacatgacggatatacacatcatttaacagtttcagatgataaatcgtacagcaaaaattgcggaaaccgcttctgacaagcgttctcgcaaaaaaaacgttagcactcaaaggagatacgttcgcgtaaaaaaaagtccaggataaatcctaattttacttaatgatacaaattagagtgaatttttagcccggaatgctgtctcctgggtaaagcgtgcgcacgtacagggcgcatgataaaccctaccgcattacctaccttcgctgcttcaaccaggctggcatgttcttcttctgtcagttcttcagtcatccaaccaattaccacgctgtaatttcctgtacgcaaagcgcggatcatcgactccagcgtatgacgaggcgcaagctggctaatttgcatcactttcgttaatggcaaacctgaagactgtacccattcacggctgagcttttgctgcggcgtgagccagagctgccatcgtgattgttggcctaactgacggagtaaaggcaaaagcaggagttgcgccatcatgggctggtcttcgtggtagacaacttcactgaccagtcctgccgcggcattttccgtagcggtgcgcgcagcgttgtgggtagtggtaggaaatgacgaagaacgatttgcataacctgaagtgtacataatcaatccagccctgtgagttactgtatattcatacagtacccctgtggcgatgaaagatcaactctattttcggaaactgtctcgcaatttttattcttagtggcgtcaaaaataaaaatcatcttgctcgcggagtataagttgcctattttcgtcattaacggatccgttactgcaaattattcttttactttatgatttaaaaggaattttatgagagcactctcttatgacaggatctataaatcgcaagaatatttggcctctttggggacgatccagtatcgatctttattcggtagctatagtctgaccgtggaggataccgtctttgcgatggtggctaatggcgagctttatctccgcgcctgtgaagaaagcgtaccctactgtgtgaagcatcctcccgcctggctcatgtttatgaaatgtggacgtcccgttatgctcaactattaccgggtggatgaaagcctgtggcgcgatcagcagcagctggtgcgtttatcgaagtattctcttgacgcggcaatgaaggaaaaacacagccgtattttacagcacagactcaaagatctccccaatatgaccttccatctggaaacattgctcaatgagtcagggataaaggacgaaaatatgttacgcatactgggcgcgaaaatgtgctggctaaggttgcgacaaagcaatcccttgctgacggtgaaagttttgtatgccctggaaggcgcaattgtcggcgtacatgaagcggcgctcccggcgagtcgtcgccaggagcttgccgactgggctcattcgcttacggctgggtaattaatgtagaaatcggcggtgaaatttgccgttgcaagcgtccaatctcgggcagtaaggcaatgagcaaaccaatttgttgaacaaccagaggttctttgctgtccggacgtgtttccagtgactgaactcgctgctttaaaccctccagcgcctggtgtacgcgctgttcgtcttcaggttgatgatgaagcgcatcatcaacgtagcagaccgcgtcatccagaagccccaacacgtccggattactgagcttttcgcggtgcgcgccgagggcggagatatagctggtaaaagtgtgattgaggcaaagcagcctgaacgccgcctcccgggtttcagccgtgacgtcgggttcgctcgacatattagaaaccacggatgccagttctgcatcgcggttgtgcgcgtcgcgtctggcaatgcgataggccaggcggttatcccgtccctggtgatattgctcaaggatcgcatcaaggtagcggcaattagcatcggtggcgcgctggagtacccggggaaggttgcgaaagcgccagtccggccaaataaagctgaccgcagcccaggcgatagcgcagccaattaacgtgtcgacgacgcgcggtaacgctacctcgaagccttcgcccaggaggttaaagcagagtaataccagcagggtgatgaacatcgtcgcatgggcatactgcacattacggaatgcgaagaaaagcacgccggtaatcaccagcagaactaactgtccttcaagcgaaggaacaaaccataaaatcggcaggccgatagcaacgcctaccaacgtgccgataatcctgagcgcaaggcgatggcgggtcgcgttatagttaggctggcaaacgaacaggctggtgagcaatatccagtacccgtggcgcatcccggtaatttggatgagagcataaccgatgcacaataccagcgacatgcgtaccgcatggcgaaagagagcggactccggggtaaaattacggctcagacgcagccagatgtcgctaaacccgtgcaggctatcatcagccaactggttttctgactcattgcgcggcattgcctgggcctgctccgactcgatcgtcgctagttgcgcatcaatagcgcgtaggttggttaataagaatccaagcgtattcagcagctctaaagaagcgccgctggcgcgcatacgttcaagcgcggcgtcaatgtgggtaaagacgcgttcaaagcgcggatcatgctggtacggcgtacgcagtaagatacagcgcgccagctgcgtacaggcctgcgcctgcatcgacatcagacgctgaaagcggaacatgacgtcgctatggcgaaaataatcgcgcagcgtctggtattgaatatgcgaagaactggcgcgttcatgaatatcctgcgccacaaaatagtaatggagggtgcggcgcgtaccgcgttgaccgcgatcgccgcgcaggcgagtcaacaacgacactttcgtttggttcagcgtcgccattaactgcccgttcgctaacgctaaatcatagagcggcgcctggctttcatcttcaatatcaggatcaaacagacgtgatttcagttccagatagtgcgctaactgttcgtaactgcgtgccagattatcctgcaacggacggatcggaaatagcagatgcccggttagcgtcagtaggttataccatactgcgcctgccagcaggagcagtggttgctgataccagtgatcgtataaagaggtacccagcatcgtatagatggcaatgagtaacgcgccgaacgcgatggtggcatagcgttgccccagtcctcccaacagaataaacccgctggtggataacgttaagcccaacgcaaatagccacggccagggaaagagcagctccacagaagccgacgcgataaaaaagcaaattaaggtaatgattaaattacgcaagcgtccggcaaggcgatcgtcgagatcggttagcgccgcggcaaccataccgagcgtgagcgggatggtaagtttgacgtcgcccagccaccagggcagggcggtggtgccgcacagagcgataaaaatgcggatgtaatacagccaggtactgttccaggtataacggcgaatcaacggacttaacataaaggctatttgtcccgatcattcaaaacggcggcgcgcgttagcttctcgcgcggcgcgagcggtttctacagagacgacgcggcgaccgacaggccaaagcgcaatcgcggcaattttaaagttcgcaataccgacaggtatcccgatgatagtgacacactgcgcgataccggaggcaatgtgcatcaggcatagccaccagccgaaaaaaagtaaccagaaaatattcagcaaggtaccgccagtattcattaatacgctttttgccgccggattaagttcgtcaacgtgaatggcttcattaccgtaagggaacagggacagtttggttatctcccagcaggagcgggtcaacggcagggtaaaaataagcacaatactgaccagcgtcgccagcagccaggccagcgtagtggcaaagccgcccagtacaaagtttaaaatattcagaacggtacgcataaaccctcagttcattccggttttctatcactgcgggcaattgtaacgtttttttagactggagcacgttttctctggcggttacactgataagcacatctttacgtctggattcgctgagtcatggaactgaaagcaacttctcttggaaaacgtctggcgcaacacccgtatgatcgtgccgagatcctcaacgctggggtgaaagtgtctggcgacaggcatgaatatcttattccattcaatcagttattggcgattcactgtaagcgtgggctggtatggggcgagctggagtttgtcctgccggaggataaagtcgtgcgtttgcacggtaccgagtggtcggaaacccagcaattccatcgctatctggacgcgcactggcgtcgctggagccaggagatgagtgatgtcgccgcgcaggcattacaggagcaatgggcgcgtattagtgagcgaacgggcggaaaccaatggcttacccgtgaacgcgttcgggggctggaacacgaaattcgccagacgtttgccgccttgccgctgccggtctcacgtctggaggagtttgctcactgtcgcgagatatggcgtaagtgtctggcatggttacaggatagcgagggtagtcggcagcagcataatcaggcgtatgctgatgccatgctggaagcgcatgccgacttttttacgcagatagaatcctctccgcttaatccttcccaggccagggcggtggttaacggcgaatcatcgttactggtactggcgggcgcgggaagcggtaagacctcggtgctggtggcgcgcgcgggttggctgttggcgcgcggacaagccgatgcggggcaaattcttttactggcgtttggtcgcaaggcggcagaagagatggatgagcgtatccgcgagcgcttacatacggaagagattactgcccgtacgttccattcgctggcgctgtatattattcagcaaggcagtaaaaaagcgccggttgtcagtaagctggaaagtgacgccaccgcgcggcatcagctatttctgcgcacctggcgtcagcagtgtagcgagaaaaaagcgcaggccaaaggctggcgtcagtggctggaagaggagatgcagtgggtagtgccggaaggtaatttctgggacgatgagacattgcagcggcgtctggcccctcgcctggatcgttgggtcagtttgatgcgtatgcacggcggcgcgcaggcagaaatgatcgctggcgcgccagaggagtgccgcgagctgtttggcaaacgcattaagctgatggcgccgctgctaaaggcctggaaaagcgcgttgaaagcggaaaatgccgttgatttctccgggctgatccatcaggcaatggtgatcctcgaaaaagggcgttttatcagcccgtggaagcatattctggtcgatgaatttcaggatatttccccgcagcgggcggcgctgttagaggcgctgcgcaagcagaatagccagactacgctgtttgccgttggcgatgactggcaggcgatttaccgttttagcggggcgcagctctccttaacgacggcgtttcatcagacgttcggcgagggcgagcattgccacctggacaccacgtaccgctttaacagtcggattggcgatattgccaatcgctttgtacagcagaatccgcaccagcttaaaaaaccgttaaatagtctgaccccaggcgataaaaaagcggtgacgttattggatgaaagccagttggacgcgttactggataaattatccggctatgcgaaggaagatgaacgtatcctggtgctggcgcgctatcaccatctgaaacccgcgagtctacaaaaagcggcgactcgctggccgaagttacagatagacttcatgactatccatgccagcaaaggccaacaggccgattacgtgattcttgtcggattgcaggagggtaacgacggtttccccgccccggcgcgagaatccattatggaaagtgcgcttcttcctcaggttgaggattttccggacgctgaagagcggcgtttgttatatgtggcgttgacgcgcgcgcgtgcgcgggtctggctgctttttaataaagataatccctcgcgctttgtggaggcgcttaaacagctggatgtgccggtggcgaggaagccctaaagcgcgggcggtacagcatcccgcccgcgtagcgtttatttcaggcgctcggccagataacgcgcataatccggaataagaatatctacagcgtcattaaaatgcggggactggatgataaagtccgccgttgagacgttagtggcgacagggatattccatacggtggccagacgcagtagcgctttgacatcggggtcgtgcggtaccgcgttaagcgggtcccagaagaaaatcaacacgtcgattttcccttctgaaatgagtgcgccaacctgctggtcgccgcccatcgggccgctcagcatcgcattaacgtccataccggttgcgcgctggatcagattccccgtggtgccggttgcataaagaacgtgtttttccagcaacggctgatggcgttccacccagttcattaacatctgtttgcagtggtcgtgagcaaccaacgcgatatgtttgcgcgtcggcaaggtgcgagtcgtcagttccataattcgattccgtagttaacctgtctacagattactggaagcgcttgatgctgcaagagaaagagaaaaaaattgcgcgctgggacaactcatatcaagagggcggctgtttttccgcccattgcagaaaatgatggcgtgtctgcgggtcggccagtcggaaccaatatttcagccgctgttctgtcagagtttgtgattgcggcggtacggtatcaagctctgagacgtcggaaagtaatgtgctgtcgtctgccatcatcgtggcgaactgaggaagcgaggcgcgtttcgccgatttattataacgctcggtctctatttcataatcgaccactttagccgtagaagtaatggccagaatatcgagttttaccggaatgggcatggcgtcgccgtccaaaagcgccagacgcggcgccgcgttaaaatgcgaggcttcgcgctcgttttccagccgcgggagctggaaattgacctgacttatcagttgggtatcgaaacttatcaccagcggcggagaaatataaagccgctcttcattaccgggcaggcggatggttttttccacccggaaaacgagttgatgcggcccgttttccagttcaatgctctctgcgccgcgtaataaagagctggacacctttttgccgtccagcaccagcagatcaacctcattagacaaacggagcgttgtggcaaaaacagtcaccggcaaacagagagcaaggaaggtggctagcgcgccggttttcataaggttctcctgtccaaaggccgtctggctaataatgtatcgaaatttttcttagatcatgtttactaacatatagacatattttggcgttttgctctcatacatcggtatgggatgaatggttgctatgtcaggtttgtcgtacactttgcaaaacagccaggagaaagatgatgaaagagaccgatattgctgatgttttgacgtccactcgcactatcgcgctggtaggtgcgagcgataaacccgatcgtccaagttatcgggtaatgaaatacctgcttgaacagggctaccatgtgattccggttgcgccaaaagtcgcgggtaagacattgctggggcaacaggggtatgccacgctggcggacattcccgaaaaagtcgatatggtggatgtttttcgcaactctgaagctgcatggggcgtcgcgcaggaagctatcgccatcggcgcaaaaacgctatggctacagcttggcgtgatcaacgaacaggcggcggtgctggcgcgggatgcaggcatgaccgtggtgatggatcgctgcccggcgattgagatccctcgcctggggctggcgaaataaaagtttaaatggccggatatcgctttccggccttttaaatacaatcagttacgtagtcgcggcgcctgaagctgcttgcgaatggtacgcgccagttcatccatcgatggctgttctggatgctcgtcccgcatttcgcttcgcaactgggcctcggccagataagtatgcactggctgaccatcatcatcttccattaccacgtggtaccacggagcggcgcgaagttcgtcgttaaccgccagttcatcaggcgacggctcatcaagcgaatattccgggtcgatatcgacgaccactccgaggtaacctaacagggaatggcggacctgttggccgataccgaatttgctggctatcatagtcacctcccgggaaatagataccctttatatgaggatactattccacttttcaagttacatgacgcgacaggcaaaccctttcagatacagcccttccgggtaggtggcgatcaccgggtgatcggcggcctgacggaactgctctataaattgtacatcacgaccggcatctattgcggcatcggcaatgattttctgaaataaatcgctggtcatcagtccggagcaagagaatgtcagcagtatgccgcccggattgagcagttgaatcgctaacatgttaatgtctttatagccccggcaggcgcccattaactggcttttattttcaacgaatttgggcgggtccatgatgatgacgtcgaatttttcgccgtgttcacggtaagcgcgcagcaacttaaacacgtcgtcgcgcacgaattcggctttgctcaagtccagttggttcagttcaacgttttgcctggcgatatccagcgcatcctgtgaggtatccacgctgacaacctggcgacaaccgcccattaacgccgacacggcaaaaccgccggtataagagaagcagttcagtacccgctgattttccacgtagcggcgcgtcgccagacgactgtcgcgctgatcaagataataaccggttttgtggccgccctggatatcgaccagcaatttcataccgtgttcttcaattggcaaaagcgcaggcggcagttcgccagtgaccggaccttgcgtcagcgccatcccttcttttttccgcacggcgacgtcgctgcgatcgtaaatagcgcaatccggatagcatgtttgcagcgcgctaattaatgcggcgcgttgatattcggccccggcgctgagcagttgcagcaccaaaaaatgaccaaaacgatcgatagtgacgccaggcaggccatcggactcaccggcgatcagacgatagctatccaggccgtcttttttcgccagccagtcgcgccactgctgcgcctggcgcaggcggcgggtgaaaaacgcaatatcaatggattctgctttatcaaatgtccagacgcgcgcgcggatctgggaggctggtgaccaggcgccgcgtgctaaccactttccctgatggtcgacgatatcgatagtttcaccgaggttggctttgccttccagacgggatacggcgccggaaaagacccatgggtggcggcggagtaaagatttttctcgccctttgctgaggactaaacggggatattgcggaaatgtagattcagtcatgcggagtaacctctcacaaacagtgacgcgagccggatgatagttccagcctgggaccgtgaaaacgaaatggcgcgtagggtagcacagatgagaggggcaatcaccagcgtatggcggtgagcgtttctgcacaaaatagaatcgtaaaggcacagtttcttcagcggacgctttttatagtgttatttctttacacgaagaaggaaatacaatgaaaacagtcttctctttgaccgcagccgcaatgatggcattgagtggcggcgtatctgccgcgtcggcgtttagcctcagtagcgcggatattccggcggattttcgtttaacgcaacagcacgtctttaaaggatttggttgtagcggagaaaatatttcgccgcagctgagctggcgcaatccgcctgccggaaccaaaagctacgctattaccgtcttcgatcctgatgcgcccaccggaagcggctggtggcactggacgatggtgaatattcctgcgcagattcacgacctgccgacgggggctgataaaaaaacgttacccgccggagtggtgcagggacgtaatgatttcggttatgctggctttggcggcgcctgtccgccgccgagcgataagcctcatcgctatcagtttactgtgtgggcgctgaatacggcaacactgccgctcgacagtgagtcaagtggcgcgttggtagggtttatgctgaacgcgcatgtgattgcgaaagcaaaattcacggccacatacggaagataaaacagaggacggcacggtgcaggagatgcatattcgacatcaggatcttacgacggcagaggtgcgttccagtcatctgcaccgtttgcatcgtgttacgcttttttccgccgctatctgccatattacgcagggcagtaaagtcatcattcaggatgatagccgccttgtcgccgggcctggcgagttgattattatcccggcgaacacgccgctggagattattaatcagcctgcgcagaacggttttcgctccgacctgttattactttcaccggagattattgctcgctttaaaacgatgtacgttcaggattatccaccggcaaacctgacatcgctgtgtaccccgatgagccgtagcctgacatttatgtgggagaacgtgttggatgctgtgcgccaggggttgcccgttgggctacaggaacatcaggcgatggggttactgttagcgcttttacatgatggcgcggcgggaccactgcttattgaacggcgttacaccctcacggagcaggtgcggcaactgattatgctctcgcctgctaagctatggacagcccaggagatagcccgccgtcttgctatgggaacatcgacgttgcgtcggcgtttgcagcgtgaatcgcagagttatcgacaaattgttgaagaggtgcgcatgtcctgcgcactttctcaactgcaatcgacgacgctgccaatcggcgaaatagcgctacggtgcggctacctgtcggggtcgcgatttacggccagattccgccagcattatgggtgtctgcccagtcaggtacgttaagtatgtcctgtatgagcctccaccgttgattatgaaaggagaaccatcatgtcgaacgtctgcattatcgcctgggtttatggtcgcgttcagggagtcgggtttcgctataccacgcagcatgaggcgcagcggctggggttaaccggctatgcgaagaatatggatgacggaagcgtagaagtggtggcctgtggcgacgcggcgcaggtggaaaaactcatcaagtggctgaaagagggcgggccgcgctctgctcgtgtggacaaaatcctcactgaaccgcacagccctcgcgagacgttaacaggctttagtattcggtattaaatacattttaccggcttgggcagaccggcgattttggtcgcttgctttgccgggcctttcgggaacagacgatacagatagcggctattgcctttttcttcgccgaacttattcgccatcgcttttaccagcattcggatggcgggagaggtattaaactccaggtaaaattcgcgcacgaagcgcacgacttcccagtgttccgcagagagctcaatgccttcattggcggcgatagcgactgccagcgcttcactccactgcgtcgtctctttcagatagccttcgctatcagtactgatttctttaccttcaaagatcaacataacgtttcactgcgtaatcaacacggacggcagtgtagcaaaaaataaagccctgcataagcagggctggaagaggggaatgtcgattagtcgcggctggcgaagcccagaatgctgagcaggctgacaaagatgttgtacagcgaaacgtacagactgacggtcgcacgaatatagttggtttcaccgccgtgaatgatgttactggtttcatacaggatagcgcccgaggaaatcaggataaacaccgcgctaatcgccaggtgcaatgcaggcagttgcaggaaaatattcgccaccataccaatcagcacgacgacgatcccggccattaacataccgcccaggaaagacatatccttacgggtggtcagaacgtaagcggagcagcagaaaaatactaacgcggttccacccagcgccaggccaatgacatcgcccatgcctgctgacagataggcgttaagaatcgggcccaggatatagccgaggaagccggtaaacgcaaaagcagacaggataccgaccggcttattggcggttttataggtcaggaacatcagcccatacataccgaccagcgtcagaatcaggccgggggagggcagcatcagtaccgtactggctgtcgcggtaattgcggataaagccagcgtcaggctcaacagaaaataggtgttgcgcagtactttgtgcgtactcagtagcgagctacgatcacgcgatgatgtaatgatacgatccattagtcactctcttatgacagatgtaattaataaaggagaataataaaaacagtcactgtcacccagtggttttacccatctttacgcattcgtttacgtttagtttccttaagagatttcaggtgattaccgtcgttaaaacggtctgctcatgcctggcgctacgccataaaacaggcggcagcgccaaccacgcgttaccgataaaaaaatcgctaatcacagcggtgaaacagtggaggcgatcaatacgtattcagccagttttgtgttgaagaaatggtcaatgtgccgctatttcaggcaattaacgaaattttgcctgtttttcacgcaaacgaacacattcggtctttacatggcgcaccgggatgtttatagtgcgcctcattccggaagtgtggccgagcggttgaaggcaccggtcttgaaaaccggcgacccgaaagggttccagagttcgaatctctgcgcttccgccagattaaacaaggggttaccgaaaggtagcccctttgtttttttaggcgctatagaatatagttagaaaatactgttagaatatttcccgaaaaaacggactacgcgagtctttagtttcttttcgtttcccgatgtgtctatttattgaagatgtagaccattctgggaggtgaaggatgccccatctctttcagaataatgttggtatattcgacaacagggcctcttggatgattttcttctttatcctgaagatgggtcagggcatgtacaacttcatgaataaatgaacgttttgtgtcaaaaagttgtcttccttcgttactttcataatgttcggtatatgaatcatcagaatcgtccagattgagacaaataactttcctgccttctgaaagtttgaagtgttcctgagccacggtagtttcaaaggcttcgcctgcccccagtagccagcgctgctccacatcatgtagttctttttcatatgcgtaattcatcagtctgcggaatgtttcgctttgggtatacgcattttgaagtacggaggatagttcatcgtagcattcgtcataagtgtcgtcatcaatttctgtatcagggtctattccacccgcgcctgagataaggtactccaccacacactctggctccagacggaattcactgtttatggcaaggctgtcatgagcaaggcgtagccgtgaggggtttggtgcatgttcgggaatatcggggaaaacaggtgtatctgcggtatttaatctatatgtggatactccgctttgaggtattaatctgtaggtgaccggaagcataacttcttatttcctgactacaattatgaattatttaaattaaacaataatagtgtttttagttaatgtgccacatacaggtaacgctatgattcagacaaagccaacaagtaatacgctgaaaatgttatttataatgaaacttaggggcggggtttatttaataaaacaagggggcctctgtttgaatacttcttgtttataaaatccctttatctcgactaaaatatcggatgggggaaaagagttctatcattgtaatccgggagtggagtaggggtatgttgactacctgtcagatcggctcctgttaatgctttcgctaaagttagagctatcttatctaatttcgcaccatttagtttggtgtcagttaagtctgagccgaatagaattgcagcggttaagtttacaccggacatgttagcgcaagtcaggtctgcgtgagtcaggtttgctttagtcatgtttgaacccattagatttacagcgtgtagatttgcacaacacaaatttgcaccgactaaatttacattagatagagttgtttcacggaaatctgcattagaagcatctatttttgacaaatcttccccctggaaatctttatgagccaggtttactccgcgcaggttcagaaaactatcctcggttataagtgaatcaggctgttgtatattatgtttactcatcagttttaacattcgacatacattccaaaatctctcactatcaactttatccgttacagtttttccatttttgttcacttcaataatgaccatgggatccgtattttcggatgctgctccacatgacagacatatagtacacccgttgacatcctccagaaatattttattaccatcgaagaaagcatttttatttacatataataatgatgtggtcagttttccaattacctcccgaaaccatctttcattgcttcttcttactccaccacaggtaaaaaaattgacaaaccattccagtataccgcgtggtgaagttgcacttttcattgcttctttcgtaccggtaccggccgcatgcaaatatcttaatatattttctggggacgcgttagttattggcattttgattccttcttatggaagtgagccgactccttataggtgtgagtcaagtcacatttatacaaggaataataaaaaaagatataaggtgatttttgtatttagagctttggttgagtatgagtaggtgtctggcatctgacaagaggcgatgatatctgccataacggtgaagcagaagtaatatcacccgtgaataataagattatccttgctattgacttccttcatttccagcatagcttacgcttcatcatcattgaataaacaattaagtttgttgagcgaaaatttacttaaagaaaaaataataagcaccaatattttttgcagtatttcaacttataccagaataaatgcgcgtagatggcgtaaaaacctgatgagcaggaatacttacacactaaaaatgctcccgcaaacagagcaaaatgagagagatgaacgtttgccccttacatttccaccaaagattctggtcttgtctcttgtaaagggcatacgtatcgcgttttatctcattaagaaagtatgttgacgtattaaattatgcataatgctctttcaattgcttcacgtttgaaatgaataattcaaaaccagtgagcgcctcttcttcggtactggtttgcggcaagcgataaagcgccactaaagcagtattgtctgcgtcagcgccgatagtgacggcgctggtgtagttcagacgtaaaaaatgctgcaaagtcaggatgtcgtcaggcaatggcataaagggacagcacatttccagtgtatgatcggattcattaaaataaacctgtatcccatcatcaatgataagcagtggctcatcttctggcgcatccaggcctaacgcgtcatataaacgatttaatagactttccatatagttacctcaagactcaagatgtgattaatgaagaaatgccttttactgactgccaaatattttcatccccaactcgtttttgataggaaagattgagcacctctggcgataaatttttcattactttgtttcccgccccgcccgtattttgtttctgaatctccaggttaccgctattcagtaatactttttggaaaattttctgtccaccgctatccggaagactaccaggcgcacttaacatatgggtctgatgtaaggaaatgatctctcgcttgatttctgaatccatcatccctgtacgatctttgccgcttttacaattccaggcgggtaccgcgtcaatttcatgggctaacatggcaaggcgttgtgcgagtttatagggttcgccgccatctttatgatgttggttatttttccatatatccttaatctggcgcgctaatgtattgacgacctcataattatccgggtattgcgccagccattcgccaacccagccacctggtctggcttcagggcgtaaatcattgcctaataactgatgtagcgcctcggcattatagctatccgatgccttaaggccaaagccgagcttgagcgccagctcattaacacccacattaaatgcggcgacgtccggttttatttttaccgtctgtagatcgccatctttattgcggatttttaaatgaatcatttttcccggctgggtcaacgattgccatgcgcgcatttggtcctcgaccatcgttccctctttgccgaaaatattcgacgcggtgagtaacccgacggataccagtttcaggcttaccgcctcgcccgctaaggctttgttaagcaactcaggtttactaaaaagtgccgcagttaatacttctttggctttgttttcagcgccgacgtgacgcagaagcggatctttttcatgatagggggaaagcacgccatgacgtatcccgcaaaaaagcgttttatctttaccgtcctcatgcacactcaccgtggacatccacaaattattggcgtgatgaatattcttggtatcccaactgcatacgccctttccctcataagcactgggaaagatatcttttgcgccgattttcatctctgctgcagggagctgcgtgttggtatagtgatgcccgttatgcgtgagtgtattttttatggtttgccagggctggttattaagctgcttgacctgagcatctctaaacgctactgccgcaaagcgatgagcttcttttgcaggtaagccatcctgctgctgagtgcgtgctgcaataagttcgataagatttttcttcaatgcttttgccgcggcttcttcttgttttgttgctggccggtccgctttaactttggctaactccatttggtttgccattgacgttagaaccgggtcttgtttacccagaacggttgccgcgacggtaagaagatcgcgctgtaagttatagaggttatgcagcgagtggttagacgccttctgatgctgtagataattcccccatgtcgcgccgggttctcgcaggacaataatttccgggcgagcgtcgggcgctttagccggcgctttgccctggcctgagagaatctgcattccgttgtataaggttttttgtaggcttttaaaagcctcctgggtttttagtgaagctgagtgatagaagctctgtatttgcatagcgtttttaatattcctgaataggggagtgggaacattcaacagggttaacaaccctttaaaaggatgtgacttttatgcaccaggaactttaaaaaaatgtcctttttaatgaggaaacgcttctgatcaggcggggaggcatcctgacgtccatacgtagtggcgatcatgggggagatcggtacatcaaatgttcataaaatctacaaacttcacaatttatggcacaacttttattgaaaacccaccttcttgactcagatcaaattcaccgatttactcctgcgtaaagtaacggcgttacatcaaatgttatacaggtgtgtgtatgccagcaaagccccggacaagtaagaccgtgacgaagaatattcgtttttcctattccatgcttgaacagatagaattcgcgttgaaatctgaaaagacgcggaatttttcagcatgggtaaaagaggcctgtcgggaaaagttatgtaacacgggacataagctgtagttatcgtcttatgtaagagggggcggccattttgaaaagaacaacgtgcttatatacctcctgggtttttgccgcttttgtctctctgctgatatttgcctggagtgtcataaactatcctctctatgaatccataataattattgtcttttatatctggctaattctggtaccgctttatcttattgtgtatgagtggctaatagattgtcattaaatttatggctgcgtacttgaaaagtgatatttcatatctgtacggtaagtcattgtcgtaataatattattggtcaggcgacgggcgagcgtctgcgcattttgcatcgttttatcttcaaaattttgcagtaagcgttgcgcttctttcggatgcgacgcatataatctcagatagctctgctccatcttatactgctgcttagctgtttgctgttcaaatgttttccaggcgtgttgcacatctggcgcaaacgcattgtagtcctgcataaccagcgtttgcagcgtgcggaatgtccagtaggtagagtcgttgctcgcccgatcggttcctttatcatctccgggttgataatgacgcatcccctgataataggggagatagacgctaagagatggcattccataggcgatgtattctacgttgccgatagcctgcggtaatttcggtctgacctgtaaaatatgtgactcctgggtacgaaaaacggatataggtcgccatggttcttgtggattatgactggcataagggtcgtgcgacgttccctgatagtgattgcgtagcgcgttttttactgccgccacgctgatcttcgttattggcgttaaaaaaacaggaaatgtttccccttcgctaacgaccgtatccagatgcggattaaactggtgttgtagcgtccagacgcgcggataattataggtggtatcgtttttgttatcctgcgaataggcttgatgaaagtcgaattcgccgcgggccggatcatataatccctgctttttcgcaaagcttactaacgttggtgacgccatataattcgcgttatcattcggatcgtaatggcgtaaacgtccctgattggcggaaacgaaatagctatctgccggaagtcgtactgccagccattgatgaccgcttcccgtctccagataccatatctctttgctatcaataaacgcgacgccgaaaccttcgcccgcgcctttttgttcaataatatctcccagtaatttggcgccctgacgcgccgattgcgccactggcaggatcacggactcaatggcgtcttccgtgattcccgtttttgtcacgtaaggatcggcagccagcgccgctctgccgttataaatggtttccgttgcgctcattccgacgcccgccgaattgaaaccggcttcacccatggcgttatcgttagtatcaaagtcatgaatcgccgtatagcgcatcgctgtctccggaagcggccagctaaaattgttccgatgtgctttatactcgccttgttgatgaaacgcgatgggatgaataaccttatgcttggcgttatttgccgagccatcttcgttgcgcgcgataatgaaggagccgtcagccgaagcctgattgcctaccaaaagggtagtacaggcgatgactttacccatacccagcagcgtaacggcgaatgcaagatactttttcataaaggttcccactgaataacgcattatgggatgaattgaccctggattggaaaccgagaaagtgatcgagccagcaatattctttgccggcatcctttattttctctttattgaggttgtattgataaccacagccctgtggcagggaaggggaacagaacctgtcctgaccttagctatcaccactatcaggcagacgaaccgaaaagatattatgttcatcggcatagcggtaagatgccgagccaccgtgtaatagagcaatcgcgttaactaacgataaccccaggccgaaaccggcagtgtggcgggcattatctcctcgccaaaaacgccggaaaagcttatccgcatcggcggggtggctgcctggattagcgacccgaatttctgcaacgttatcatcataagcgctttcaatacgtatcacggcgttttcatcagaataacggatggcattcgtcagcaggtttgagagcactctttgtaataatatttcgtcagcccataccgttccctgacattgatttataaaacagatgcgcttctcctcggcaagggggctaagataatccagcatattttcgaccagcgcattgagcgaaacaggctgtttttttaccgctatattctggtgctccgcgcgtgccagaaagagaatattttctgtcagtcgcgacagtccctccagctcttcaatattatcgacaagggcttgttgatactcttcggcgctgcgttcctgactcagcatcacctgattcttccccagtaaaatattaaccggcgtgcgcagctcatgcgccagatcgtcggcaaattggttcaggcgttcaaaatcgtcggaaagcttctggcgcatggtatttagcgcttgtccaagcggcctgagctcaacgggtaacgcctgttccgccaacggctggcgaagtgtgccgctatctgtcgccgcggtgagtcggctgagcgacgtaatggcccgcagcccgtttctgatgactaatggactgagcgccgaacagacgaggatcgcgataaggctcatcagcaaactgttgcggcgatattgcgccagcatttgccgcctttccgtcgccagcctggcaatagtaagggtcagcgggtcatcgccgcttctggcgcttacgcgtaccgcggtcagttccgtgccttgtaccgcctggcgaaataaggtttcgcgggtgatgtttttagtcagcggaatctcgttaaagcgttggtcggggatgccgctatgattaatcgcaacattgtggcctgttgctgaatggatcaataagatgtcctgcttcgtatccaccatccgattgaaatagagcggcagattttccggcctggcgccatccagtaacagttgctgcatttgcgccgcccgatttattagcgtcatatcatcccgatacgttaattctttgctcagcgcgttatagagcgtccagctaatgccggtacaggcgaggataaggatggcgataaaagaaattgtcaggcgcagcgtcattgataacttaaccattctgcgacgtttccgcctgtaatcgataacccatcccccggacggtcataatgagcttcttttcaaatggatcgtctactttggcgcgcagccgacgaatcgcgacatcaacggtgttggtttcactatcaaagttaattccccaaacttcgctggcgatcgcggttcggggcacgatttctcctgcccgggacgccagtaaccagaggagcaggaattctttgcgggtcagggaaatcggtttgccatttcgtgacactgattgctttgtggcatccatgtccagaccattgatcgtcagtcgagtaaaggcagggacatgctgtctgagttgagctctcacccgggccagcagttcggcgaaggaaaaaggcttaacaaggtaatcattagcgcccgcctcaagacctttgacgcgatcctcaaccgagtcgcgcgccgtcaggcaaataacaggggactgatgcgcagtgcgtaacgcgcgtaaaacctgccatccatcaagccccggcagcataatatcaagaataatcaatgaataatgttcctgaagggccaggtgtaatccgtctcgtccatcacaggcataatcaaccacatagcctgcttccgtgagtccctgacgtacccactcaatggttttctggttatcttcaatcaataaaatcttcatcaacgcagtatgccataggcttgttagcgaatccgtaaatctccaacaagatgacataattgtcatgtccgtgtaaggttaatcctggacgcgccagatatattttcctgcatcaataccgtaaaggagtgaagcatgaaacgatatatactggctaccgtgatagcatctcttgttgcagccccggcaatggcgctggccgctggcaacaatattctcagcgtacatattctcgatcagcaaacaggtaaaccggcgcccggcgtggaggtggtactggagcagaaaaaggataacggatggacgcaattaaacaccgggcataccgaccaggatggacgtattaaagcactgtggcccgaaaaagctgccgcgccgggggattatcgcgttatttttaaaaccggccagtattttgaaagtaaaaaactggatacgtttttcccggagattcccgtcgagtttcatatcagcaaaacgaatgaacactatcatgtgccgctgttattaagtcagtatggttattcaacctatcgcgggagctaatttagagcctatcccattagggttattttacttgccattttggtcctgggcagtgctcgccaaaacgcgttagcgttttgaacgccgcttgcggcggcccgaagggcgagcgtagcgagtcaaacctcacgtactacgtgtacgctccggtttttgcgcgctgtccgtgtccaaactggctgcgccaataacgcctggtgggataggctcttagattgtattaatcgccgcgatttatggcgagcaaacatcgcggcgggaataaaaatcttcagcgtatcgactcttctcccacaagcggtggttatcccgcttgtgggcatgagtgacggttaaacaggcgcttccatctcaagtctgaccggatgaaaacggcgtttgaaataaatcaggccatgcccatcctggctaagaataatatttttgatcgccaccagatacaccagatgcgtgccaatggtttgtacctcgctgatctcgccttcaagaccggccagcgcgccgttaagtaccggctggcccagcggcccgttttgccaacatggctggtgaaaacgctcttccatcgccatccccgtcataccggcaaagtggcgcgccatcagctcctgctcatggttaagtacattaatgcacagcctgccgttaccctgaaaaacggggttcatggcgctattggcattaatacataccattacggagggcggcgtatcggtgacggaacagaccgctgttgcggtgataccgcagcgtccggcgtgacccgccgtggttacgatgttgaccgctgccgccagacttgccatcgcatcgcgaaaacgcagacgttgttcatctacttgcatgagaacctcctgccgcgttatttcagcagcttatccagttgattgatgtcgtcgttattgtgcaaatgcgaaaccgtccagccattctgatcgtattcggagaggcagcgatcaaccattgccatcatcttatccatattgccggagctctgggcctgacgcaggcactgcagacgaatttcatcctggctgcccgagtagttaatctcgtacagctcatggcgaccgccaaactcgctgccgatggcatcccacatcaatttaagaattttgatacgttcaacatggtccattccgttagagccgcgtacgtatttcgccaggtactggtcgatttgcggattattcagatcgcgggcgctggaaggcaggtaaatcaggccgctggtaacgttacgttcaataatatttttaattttcgcgtaggccattggggccatcacacgataggtttgcagcgcggcgtggtccggtagccaggcgccgtttacccacggggttgcttcggaacacatagaatcgctcaatgcccagagcatattgcgccaggccacgacttcgccgagatcggcctgcacgccccggaactctacggtacccgtacattcgagcgattttttcagcagcgcggtaatgaaatcaagtttaaccgccagacgaacacaggcttgcagtggatacatacgggcaaagccgccttccatcgtccagcgacggcaacgatcgaaatcacggtaaattaatacgttttcccacgggatcagcaccttgtccatcaccagaatggcatcgttttcatcaaagcggctggagagtggataatcaaacggcgagcccgtcgcgcccgcgaccatttcatacgaggcgcgcgaaataagttttacgccttcggcatccattggcgcgacaaacatcagagcaaaatccgggttttcgcccatcacctgggctgagccgaaaccaatcatgttgtagtgagtcagggcggagttagtggcgacgactttcgccccgctgacaataatcccggcgtccgtctctttctccagcttgatatagacgtctttcacttcgtcggcaggtttgtggcgatcaatgggcgggttgacgatagcatggttaaagtacaggccggtctcctgaatacgggtgtaccagttacgggcgttctgctcaaactggccgtagaaggctgggttagcgcccagagcgcagccaaaggcggctttgtaatccggtgtgcgtcccatccagccgtaactcaggcgtgaccactcggcgatagcatcacgctgttggcgcagatcgtctgcgcttttcgccacgcggaaaaatttatgcgtataaccgccgctgccggtatcggtattccagcatagggtatcttgcatcgacggtttatgtaatgcgtcatacagttgtgcgacagaggctgcggcattgcggaatgccggatgtgtcgtaacatctttaacgcgttcgccgtaaatataaatttcccgcccgtcctgcaggctttttaaatactcttcgcccgttaacggacgcttgttatcagtacgaaaatcttcaggtttcattgcggcctcttcctcgttaatcggaatgttttgttaataatatgtttcttatttgttgttcaattgaataggcagaagcgtaaactgtgaagagactttcaggacaacggcgggtacttttcagatgaacgtcgaagaagaagagtaaaatgcgatcgccgtcaacgttgtaagcgggaggggattcccgtgtcggcggcgtgggaaggtaagaatactatgcttccgcttcgctatcaggatgctggcgtcccagagcaataagatcgtccagcagcagcatcaattgctgtgttttttcgggcgtgaaatcggcctcaatttttcgataagcctcttctacctggcttcgggcacgggcgtacaacgtttgtccctgctccgtcaacatgacatataacttacgctgatcgttaaccggcttgagtcgcaacaccagtccgtctcgctccatgcgcgtcaatattccggtcagacttggacgcaaaatgcaggtacgaaaggccagctcgtgaaaatccatagaggggctatcggccaggattcgcacaatgcgccattgctggtcggtcagattgtggcttttaacgatggggcggaaataggtcattgccgcttcgcgcgcctgaagcaatgcgatggttaatgaatcatgcataagcgtttctcttttgcagaattattaatacctgaataatcgtgtttaccgatgtgagctatgacatctgttttatgtccaaagtttaacagaaacaaggggctttatttaactatttgatatgtatgtgtttaataataaatttgtgaaaatattgttaatcacatcacaaatgctttacttcagcttgctaaatgtacagcgaaagcataaatctaatcattaatatattaatgaaatcacagcccgttaaatcggcctgaggagtttatgtatgaagggtactgttttcgccgttgcgttaaaccatcgcagccagcttgatgcctggcgagaggctttctctcagcctccctataatgcgccgcctaaaaccgcagtgtggttcatcaagccgcgtaatacggtgattcgtcacggcgaacccattccttatccgcagggagaaaaggtactgagcggcgcgacagtggcgctcattgtggggaaaaccgccagccggatacgccctgaagcggcggcggactatatcgccgggtatgcgctggctaacgaggtcagcctgccggaagagagcttttatcgcccggcgattaaagcgaaatgtcgcgatggcttttgcccgctgggtgaaatggcgccgctgagtgatgtggataacctcaccattatcacggaaatcaacggacgagaagcggaccactggaatactgccgatttacagcgtagcgccgcacaactgcttagcgcgttaagtgagttcgctacgcttaaccctggcgatgcgatcttactcggtacgccgcagaatcgcgttgcgctgcgtcccggcgatcgggtgcgtattctggcgaaaggtttacccgctctggaaaatccggttgtcgcagaagatgaattcgcccgccaccagacttttacgtggccgctgtcagcgacgggtacgttatttgcgttggggttgaactacgccgatcacgccagcgagctggcatttacgccgccgaaagagccgctggtatttatcaaagcgccaaacacctttaccgaacatcaccaaacgtcggtgcgcccgaacaacgtcgaatatatgcactacgaagccgagctggtcgtggtgattggcaaaacggcgcgtaaggtgagcgaagccgaagccatggagtatgtggccggttacaccgtctgtaacgactacgcgatccgcgactatctggaaaactactaccgtccgaatctgcgggtaaaaagccgcgacggcctgacgccgataggcccgtggattgtggataaagaggcggtttctgatccgcacaacctgacgttacgcacctttgtcaacggtgagctgcggcaggaagggacgaccgccgatctgatcttcagcatcccgttcctgatttcttatctgagcgaatttatgacgttgcaaccgggcgacatgattgccaccggtacgccgaaagggctgtccgatgtggtgccgggggatgaagttgtcgtggaagtagaaggcgtgggccgcctggttaaccgaatcgtcagtgaggagagcgcaaaatgaagaaaataaatcattggattaacggcaaaaatgttgcaggtaacgactacttccagaccactaacccggcgaccggtgacgtgctggcggaagtggcctccggcggtgaagcagaggtgaaccaagctgtcgcggcggcaaaagaggcgttcccgaaatgggccaacctgccgatgaaagagcgcgcgcgcctgatgcgccgccttggcgacctgattgaccagcatgtgccggaaatcgcggcgatggaaaccgccgacaccggcctgcctattcaccagactaaaaacgtgctgatcccgcgcgcctcgcataacttcgaattcttcgccgaagtgtgccagcagatgaacggcaagacctatcctgttgacgataaaatgctcaattatacgctggtgcagcccgtcggcgtctgcgcgctggtgtcgccgtggaacgtgccgtttatgaccgcgacctggaaagtcgcgccgtgcctggcgctgggcaacaccgcggtgctcaaaatgtccgagctgtcgccgctgactgccgacaggctgggcgagctggcgctggaggcaggaattccggcaggcgtgctgaacgtggtgcagggctatggcgcgacggcgggcgatgcgctggtacgccaccatgacgtgcgtgcggtgtcgtttaccggcggtaccgccaccggtcgcaatatcatgaaaaatgccgggctgaaaaaatactcgatggagctgggcggcaaatcgccggtgctgatttttgaagatgccgacattgagcgcgcgctggacgccgcgctgttcaccatcttctcgatcaacggcgaacgctgcaccgccgggtcgcgcatctttatccagcagagcatttaccctgagttcgtgaagcgctttgccgaacgcgcgaatcgcctgcgtgtcggcgatccgaccgacccgaacacccaggtcggcgcgctgattagccaacagcactgggaaaaagtctccggttatattcgcctcggcattgaagagggcgcaacgctgctggcgggcggtgcggaaaaacccactgacctgcctgcgcatctgaaaggcggtaacttcctgcgcccaaccgtgctggccgatgtcgacaaccgtatgcgcgtcgcgcaggaagagatctttgggccagtcgcctgtctgctgccattcaaagacgaagcggaagggttacgtttggcgaacgacgtggaatacggtctggcctcttatatctggacccaggacgtgagcaaagtgttgcgcctggcgcgtgggattgaagccggcatggtcttcgtcaacacccagaacgtccgcgacctgcgccagccgttcggcggcgtgaaagcctccggtaccgggcgcgaaggcggcgaatatagcttcgaagtgtttgcggaaatgaaaaacgtctgcatctcaatgggcgaccatcctatcccaaaatggggagtttgatatgggcaagttagcgttagcagcaaaaattacccacgtgccgtcgatgtatctttctgaactgccgggaaaaaatcacggttgtcgtcaggcagccattgatgggcatattgaaattggcaagcgttgccgcgaaatgggcgttgacaccattatcgtattcgacacccactggctggtgaatagcgcttaccacattaattgtgccgaccatttccagggcgtctataccagcaacgaattgccacactttattcgcgacatgacctatgactatgacggcaatccggagctcggccacctgattgccgacgaggcagtcaaactgggcgtgcgcgctaaagcgcataacatcccgagcctgaagctggagtatggcacgctggtaccgatgcgctacatgaacagcgacaagcacttcaaagtggtctccatctcggcgttctgcactgtgcatgattttgccgacagccgcagactgggcgaagccattctcaaggcgattgagaaatatgacggtaccgtagcggtattcgccagtggttctctgtcgcaccgttttattgacgaccaacgggcggaagaagggatgaacagctacacccgcgagttcgatcatcaaatggatgagcgcgtggtcaagctgtggcgcgaaggcaaattcaaggagttttgcaccatgttgccggagtacgccgactactgctacggcgaaggcaacatgcacgacacggtcatgctactgggaatgctggggtgggacaaatacgacggcaaggtggagttcatcaccgacctgttcgccagctccggtaccggccaggtaaacgctgttttcccgctgcctgcgtaaggggtgtttatgccgcactttattgctgaatgtactgaaaatattcgcgagcaggctgatttacccggcctgttcagcaaggtaaacgaggcgctggccgccagcgggattttccccatcggcggtatccgcagtcgcgcccactggctggatacctggcagatggctgacggtaagcatgattacgcgtttgtgcatatgacgctgaaaatcggcgccgggcgcagcctggagagccgtcaggaagttggcgaaatgctgtttgggctgattaaagcccacttcgccgacctgatggagaaccgctatctggcgctgtcgtttgagattgccgagctacatccgacgctcaattacaaacaaaacaacgtacacgcgttatttaaatagcacactctttcgcccggtggcgctgcgcttaccgggcctacaaaaaaacgatgcacgaagcaataccgaaccgtaggccgggtaagacgcacccgcgtcgccacccggcacagcagcaccgaatgacgtaacaggaaacactatgctcgataaacagacccataccctgatcgcccagcgacttaatcaggctgaaaaacagcgcgaacagattcgcgcagtgtcgctggattatcccaacatcactattgaagatgcctatgccgtacagcgtgaatgggtcaatatcaagattgccgaagggcgcacgctcaaaggccacaaaatcggcctgacctcaaaagcgatgcaggccagctcgcaaatcagcgaaccggattacggcgcgctgcttgacgatatgttcttccatgacggcggcgatatccccaccgaccgttttatcgtcccgcgtattgaagtggagctggcgttcgtgctggcgaaaccgctgcgcggccctcactgcacgctgttcgacgtctacaacgccacggattatgtgattccggcgctggaactgattgacgcccgcagccacaacatcgacccggaaacccagcgtccgcgcaaagtgttcgacaccatttccgacaacgccgccaacgccggggtgatcctcggtggtcgtcccatcaaaccagacgagctggatctgcgctggatctccgcgctgctctatcgcaacggcgtgatcgaagaaaccggcgtcgccgcaggcgtgctgaatcatccggccaacggcgtggcgtggctggcgaacaagcttgccccctacgatgtccagcttgaagccgggcagatcatcctcggcggctcgttcacccgcccggtgccggcgcgcaagggcgacaccttccatgtcgattacggcaacatgggcgcgatcagttgccggtttgtgtaaggaaaaaacgatgaaaaatgctttcaaagacgcgttaaaagcggggcgtccgcaaatcggtttgtggctggggcttgccaacagttacagcgctgaactgttagcgggcgccggcttcgactggctactgatcgacggtgaacacgcgccaaacaacgtgcagacggtgttgacccagttgcaggcgattgcgccttatcccagccagccggtggtgcgtccgtcatggaacgatccggtacagattaagcaactgctcgacgtcggcgcgcaaacgctgctgataccgatggtgcagaatgccgatgaagcgcgaaacgccgtggcggctacgcgttatccgcctgccggtattcgcggcgtgggcagcgcgctggcgcgggcatcgcgctggaaccgcattccggagtatctccacctggccaacgacgccatgtgcgtactggtgcagattgaaacgcgtgaggcgatgagcaatctggcgtcaattctcgacgtggatggcattgacggcgtgtttattggtccggcggacctcagcgccgatatgggctttgccggcaatccgcagcacccggaagtgcaggcggcgattgagaacgccatcgtgcagatacgcgcggcggggaaagcgccggggattctgatggccaatgaagcactggcgaaacgttatctggaactgggggcgctatttgtcgccgtcggcgttgacactacgctgctggcgcgcggagcggaggcgctggcggcgcgctttggcgtagaaaaaaaactgtccggtgcgtccggcgtctattaagcctggccccgtaagcgcagcgctaccgggcaaccgtagtaccctacaaaattcccatcagaggaaaaaaaatgagcgacacatcatctgcacttccggaaagccccgagtctgtcagttcgcacaacgcgctcagcacgggtcaacaaaccgtcataaataaactgttccgccgactgatcgtatttttattcgtgttgtttatcttctcgtttttagaccgtatcaacatcggttttgccgggttgacgatggggcaggatctggggttaagcgccaccatgtttggtcttgccacgacgctgttttacgctacctacgtcattttcggcattcccagcaacgtgatgttgagcatcgtcggcgcccgccactggattgcgaccattatggtgctatggggcattgcatctaccgccacgatgttcgcggtgggaccgaaaagcctgtatgtgctgcgaatgctggtgggcattaccgaagcgggctttttgccaggaatattgctctatttaacctactggttcccggcatttttccgcgcccgcgccaacgcattatttatgattgccatgccggccactaccgcgttggggtcgattgtctccggctatattttatcgctggacggcatattcaatctgcatggatggcagtggttattcctgttggaaggatttccgtcagttttgttaggcattatggtctggttttacctggatgataccccggcaaaagccaaatggctgacggcagaggataaaaaatgtttgcaggagatgatggatagtgaccgcctgacgctggttcagccggagggggccatcagccataacgccatgcagcagcgtagtctgtggcgcgaagtattcacgccaattgtactgatgtatacgctggcctatttttgccttaccaatacgcttagcgccattagtatctggacgccgcaaatcctgaaaagttttaatgaaggcagcagcaatatcaccatcggcctgctggcggcgatcccgcagatttgtactattctgggcatgatttactggagccgccattcggacaaacatcaggagcgtaaacatcacacggcgttgccgttcctgtttgccgccgcgggctggctgctggcgtcggcgaccgaccataacctgatccagctcctggggatcgtgatggcatacacgggttcctttagcgcgatggcgatcttctggaccacgccggatcagtcgatcagtttacgcgccagggcgataggcattgcggtcatcaatgccaccggcaatattggctccgcgctcagcccgtttatgattggctggctaaaagatatcaccggtagcttcaatagcggactctggtttgtcgcttctctgttagtcgtcggcgccgccattatctggcttattcccatgaaagcatcgcgtccgcgcgccaccccttgaggagaaactatgtgccaacgtgcgatcgccaatattgatatcagcaaagagtatgacgaaagcatgggcagtaacgatgtgcattatcagtcgtttgctcgtatggcggatttctttggtcgtgatatgcaggcgcatcgccacgaccagttttttcaaatgcactttcttgataccgggcagattgagctacagctcgacgatcatcgctattcggtgcaggcgccgctatttgtgcttacgccgccctcggtgccgcatgcttttattaccgaatcggatagcgatggccatgttctgacggtacgcgaagagctggtttggccgctgctggaagtgctttatcccggcaccagagaggcctttggcctgccgggaatctgcctgtcgctggcggataaacccaacgagctggcggcgctcaaacattactggcagctaattgagcgggagtccacggaacaactggctggctgcgaacataccctggtgctactggcgcaggcggtatttaccttgctgttgcgtaatgcgaagctggacgatcacgccgcaaccgggatgcgcggtgaactgaaactttttcagcgctttaccctgttaattgacaaccacttccatcagcactggacggtgcccgattatgcctgcgagctgcatattaccgaatctcgtttgaccgatatttgccgacgttttgctaatcgcccgcctaaacgcctgatttttgatcggcaattacgcgaggcgaaacgactgctgcttttttccgacaatgctgtcaacgagatcgcctggcaattaggttttaaagatccggcttattttgcccgtttctttaatcgccttgctggctgttctccttcgcagtttcgccaacgtgaagttccctcttttctcaactaagaagagtaaaaacatgatgaaaaaaagcgtcgctatgctggcggtgtgtatgctggcgcaaagccaccttgccattgctgccggtactcctgcgcctcaagagatcaacattgttttactgggcaccaaaggcgggccttctttgctcaatacagccagactaccgcaagcgacggcgcttactatcggcgataaaatatggctgatagatgccggctacggcgccagtctgcaactggtgaaaaatggcattccactgcgcaacatcaatactattttgctcacccatctgcacagcgaccacatactggattatccttccttgctgatgaatgcctgggcgagtggtctgaaagaccataccatacaggtttatggcccgccgggaacccaggcgatgacgaaggctagctggaaggtctttgacagggatatcacgctacgcatggaagaagaggggaaacccgatccgcgcaacctggttaaggcgaccgatattggccagggcgtcatctataaagatgaactggtcacaataagcgcgctgaaagtgcctcattcccctttcccggacggtgaagcgtttgcttaccgttttgatacccagggtaagcgaatcgtcttctctggcgatacgtcctggtttccgccgcttgcaacgtttgcccagggggcggatatcctggtacatgaggcggtacatgtcccctcggtagcaaaactggctaatagtattggcaacggaaaaacgctggctgaagcgattgcgtcgcatcacaccacgattgaagatgtcggtaagattgctcgcgagtcccacgtgaaaaaactggtgttaagtcatctggtgcctgcgacggttgcggatgacgtctggcaacaggaagccatgaaaaattacccgggccctgtcattgtcggtcatgacaatatgacgataagcgtaccgtaggtatcagagcagggataaacccacgggctgacatgatgtcagcccgttatgcttttggcgatcagcatgacgcgcagagcttttgtctaaaacattattttttctaaacactacttgctgatttttatgcacaataaaggtaagatgattgctctggtgaaatatcactaaataagaatgtcacggatggaatttatacagtgttaaaagcaatgcgtttctttgtctgccggccatcagtaatatcctctgtaccggctcctcgttgccaaagtgaaggttagattaaacgaatcaaaaaatatccgaactgtacaatttttatatcaaacatatttaactgcaaaatactgcaaacgtgcgcgaatacacttaatcagtagtatggctaatgcatactttatttcctaaactttcttattatctatttgaatatttctggttaaaccaaatggacaaacggataccagacactcgaaaggataactgcaggcttctggtttaggattgcagttaccaggacaatggctattttctttaagcgatttccatagaacaggattaaacctggtaacgttgtaaacagtaacgggataaagtttatcgtttattaagacccccttattaaaggggatgataatgctacctggaggcatgtaaacatctgcctgataccataaggtcaatctaagattttttaggctatgtatgcatgagaacgacactccggtagagggacttataactgtatcaacgaccttccattccattacagaaaccttttaagtgaaatagtcaatggtgtaaattacattttccgcaagcctattcaggatagatgaaaatctgagaaacataactcgttgaaaacgatcgttttttattgaccactctatttatattgattttttaataagttatttattttatgctcttattttgtttacattctattacatttttgtattttaggcgtggtgtaaatattgggcggtagtggatgttataacgctcaattattaaactgtaagtgactgttgtatttcttatttataaataccgcaacctgtaagcgcagcggtacattttacccggcattgacagggagaaggtacgtatcaaccagagagtacaaaacagtgaaagaatatattcttcaggcaataaatgatcgctaacgtgtaaaaataaccgacgtatctaaaaaatgtgaacgtgtggctggtctttatttaaacgatgatcttcgcaatggcgcattaatggctgacattggcggttcgttgatcgggttgtgcgcggtgaaaggctatatttcttccgttgagggaagtatgtcagaggcattctggtattataccgggtgcatgtaaatccggggtgggcagaaagcccaccctcggtttattgcctttatcgtggattagggatgcgagataaagcgagaaaggcgttgcagcagtaaccggttttcttcgcgcagccgtgaattctcttccagcagcgttaacgcgaccgcgatcccaggccagtcgagcgccagctcctcgcgtaagcgtagcgcgcgttgtaccacgctcgctgcgcgatcgtcgaattgccagtcggcgttatcgtcttcgtaaggctcaattacgccaagtccgacgatttcgtttagctcctcttccgtcacgccggtgtgcaaacaaaattcggtgatggtaaaggtgacagtgatgttagccattatgctttcccccattgctggcgtgggtcaaaggacgactgcgcgtccgccagttgttgccacagggcagctgttttctcgtcaggtttcggcggcataacgattttgatgatggcatagagatcgccagtgtgctttttactggctaatccttttcctttgatacgcagccgctgacctgcctggctgccggggggaatggtcagcaaaatacgctctttaagcgttggcacagacaccttagcgccgagcgccgcctcccatggggcaagcggaaggacgacttccagatcctgattgacgatatcaaagagcggatgcggggcaatatggataacgagccataaatcgccattaggtccgccgttttcccccggcgtgccctggcctttcagtctgattcgttgcccgttgctgacgccagccgggattttcacattcaatgtcttgggaatttcccgctccaccaggccgaacgcgttataaacggggacggaatagctaatcgtacgctggtgctcttccagcgtttcttccaggaataccgccacttcaatttcgatatcatgaccgcgtgcggcgtggcggtgatgcgaatggcgaccgtgctgaccaaaaatagacgagaaaatatcatcaaaatcttcagcgttatacggctggccttcgtgttgctggaactggcgattaaattgtggatcgttacggtgttgccataactggtcatactcggcgcgccgttgctcatcactcagcacttcccatgcttcagcaacctctttgaaacgggcttcggcatcgggttctttgctgacatctggatggtacttgcgggccagtcggcgataggcggtcttaatcgtcttgagatcgtccgtcggtttcacgcccataatggcgtaataatccttaagttccatagcatcatctcgctaaatcaatacatacagaagggaccccaaaaggtttctccactaagtgtagggtaaacctgaaaagtgcgtatgaaaacaccagttatatcattagtaagaataaattacgttgttcgactatcagaaggttgcgcagcgcgccgacataactttacaggggaaaggttgccaaaaccgcgccagtggctaagataactcgcgttaaacagtgagggcgcaatggcgaaacaacaacggatgggctggtggtttctttgccttgcatgtgtcgtggtaatggtttgtaccgcgcaacgcatggcgggcctgcacgccttgcagatgcaggcgacggcctctgctgcggtggtcagcgctccctcctcgacagatgacggctcgccggtcaccccctgcgaattaagcgccaagtcgctgctggcggcgcctccggtactctttgaaggcgctatccttgcgctttgtctactgctttccttactggcgcctgtccgggtcatgcgcctgccgttttcgcctccacgggctatttcgccgcccacattacgggtacatctacgattttgtgtcttccgtgaatgacagaccggttattgctaacggttaattactcattcacggagaaaaaatatgatgattttgttcaggcggatactgttctgcctgttatggctttggctgcccgtctcctgggcggcggaaagcggctggctgcgttcgcccgataacgaccatgccagcatacggctacgtgccgatacgtccgctaacggtgagacccggctgttgctggatgtcaaactggaaaacggctggaaaacctactggcgcgcgccgggggaagggggcgtggcaccctctatcgcctggaaaggcgacatgcctgaggtaagctggttctggccaaccccctcgcgctttgatgtggcgaatatcaccacccagggatatcacgacgaggtgacctttccgatgatcgtgcgcggtacgctgccggcgaccttgcgcggtgtgttgacgttatcaacctgcagcaatgtttgtctgttgaccgattaccccttttccgtgacgcctactgtgcagaatgccgattttgcccatgactatgcgcgggcgatgggtaaaattccgctccgcagtggactaacggactcgcttgacgtcggctatcgcccgggagaactggtggtcactgctacgcgagcggcgggctggtcatcgcccgggctctatcttgacaccgtagatgacgtcgattttgcgaagcctcgtctgcgcgtagagggcgacaggttacaggcgacggtgccggtgacggacagttggggcgaaaaggcgcccgatttgcgcaacaaatcgctgaccctcgtgttagccgatggcgctatcgcccaggagagcacgcaaaccattggcactgcgccagcgcaaacgccggacaatgcggcgctacctttctggcaagttgtaatgatggcgctgatcggcggactgattcttaatttaatgccctgcgtactgccggttctgggcatgaagcttggctctattttattggtagaggaaaaaagccgctctcacatcaggcgacaatttttggcttcggtcgccggtatcattgcgtcatttatggcgctggcggcgtttatgaccctccttcgcctgtcaaaccatgcgctggcctggggagtccagttccagaatgtatggtttattggttttatggcgctggtgatgttgttgtttagcgccagcctgttcgggctttttgagttcaggcttccctcatctatgaccacgaaactggccacttacggcggtaacggtatgtcgggacatttctggcagggggcattcgccacgctgctggcgacgccttgtagcgcgccgtttctgggcacggcggtcgccgtggcgctcacggcgtcgctgccgacgctgtgggggctgttccttgcgcttggcctggggatgagcgcgccgtggctactggtcgcgatacgaccagggcttgcgctacgtttaccgcgccccgggcgttggatgaatgtcctgcgcaggatcctcggtctgatgatgctggggtcggctatctggctggcgacgttactcctgccgcatttcggcttcactgcgtcaaagagcgcgcaagacacggttcagtggcaaccgttgagtgaacaggcaatccagtcggcgctggcgcagcataagcgggtatttgtcgatgtcactgcggactggtgtattacctgtaaagtgaataaatacaacgtcctgcaaaaagaggatgtgcaggccgccttgcaacagccggatgttgtggcgctgcggggagactggacgctgccgtccgatgccattacagattttctgaaaacgcgcggccaggtcgccgtgccgtttaatcaggtatatggccccggcttgccggaaggggaggcactgcccactttgctgacccgcgatgcggtattacaaacgttgaaaaaagcgaaaggaataacccaatgaaatacatgattgttttactgctggcgctgttttcgacgctgagcatcgcgcaagaaaccgctccttttacgccggatcaggaaaagcagattgaaaatctgatccatgcggcgttgtttaacgatcctgccagcccgcggataggcgctaaacaccctaagctgacgctggtgaactttacggattacaactgcccgtactgcaaacagctcgatccgatgctggaaaagattgtgcagaaatatcctgacgttgcggtcattattaaaccgctgccatttaaaggagagagttccgttctggcggcgcgtattgcgctgaccacctggcgcgagcatccgcaacagttcctcgcgctacatgaaaaactcatgcaaaagcgcgtttaccatacggatgacagtattaaacaggcccagcagaaagcaggggctacgccagtgacgctggatgaaaaaagcatggaaacgatacgcactaatttgcagttggcaaggctggtcggcgtgcaaggaacgccagcgacgatcattggcgacgagctgattccgggcgcagtgccctgggatacgctggaagcggtggtgaaagaaaaactggcgtctgccaatggcgggtaaactgcggcgttggctgcgtgaagccgcggtttttctggcgctcctcatcgcgataatggtggtcatggacgtctggcgcgcgccgcaggcgcctccggcgtttgccacgacaccattacgtacgctgacgggagagtcgacaactctggcgacattgagcgaagaacgccccgtactgctctatttttgggccagctggtgcggggtatgccgctttactacgcctgcggtcgctcgcctggcggcggaaggggaaaacgtcatgaccgttgcgctccgctccggcgatgacgctgaggttgcccgctggctggcgcgcaagggcgttgacttcccggtcgtcaatgatgctaacggcgccttatccgctggctgggaaatcagcgtgacgccaacgctggtggtggtttcacaaggtcgggttgtgttcaccaccagcggctggaccagctactggggcatgaagcttcggctatggtgggcaaaaacgttctgaatatgcgccggggtttcccggcgctaacgcgtttactgtaagaaaaacccccgttttgcgaaatcgttcccggaaaaatgatccatttctgtcacactcagaacgatttgataacaacaagaggtcatagggatgaaaaaatcattactcgctgttgctgtggcaggggctgttttgttgtcatccgccgtacaggcgcagacaacgccggagggttatcaattacaacaggtgctgatgatgagccgccataatctgcgggcgccgctggcgaataatggcagcgtactggcgcagtcgacgccgaacgcctggccggcgtgggacgttcccggcgggcaactgacgacgaaaggcggcgtgctggaagtctatatgggacactacacacgtgaatggctggtcgcgcaggggctgataccgtcgggagaatgtccggcgcccgacacggtatatgcctatgcgaatagtttgcagcgcaccgtcgccaccgcgcaatttttcattaccggcgctttccccggctgtgatattcctgttcatcatcaggaaaaaatgggcactatggaccctaccttcaatccggtaattaccgatgattctgccgcgttccggcaacaagccgtacaggcgatggaaaaggcgcgtagtcagctacatcttgatgagagttataaactgcttgagcagataacgcattatcaggactcgccgtcctgcaaagagaagcatcagtgttcgctaatcgacgcgaaagataccttcagcgcgaactatcagcaagagcctggcgtgcaggggccgcttaaagtagggaactcgctggtggatgcgtttaccctgcaatattacgaagggtttccgatggatcaggtcgcctggggcgggatccacaccgatcggcagtggaaggtgctgtcaaaactgaaaaacggctatcaggacagcctgtttacctcacccacggtggcgcgcaatgtcgctgcgccgctggtgaaatatatcgataaggtgctggttgccgatcgcgttagcgcgccgaaggttaccgtgctggtggggcatgattccaatatcgcgtcgctgctgacggcgctggattttaaaccctatcagctccatgaccagtatgagagaacgccgattggcggtcagcttgtcttccaacgctggcatgacggcaacgctaaccgggatttgatgaaaatcgagtatgtctaccagagcgcccggcagttacgcaatgcggaagcgttaacgctcaaatcgcccgcgcaaagggtaaccctggaactgaaaggatgtccggtggatgcgaacggcttctgtccgctggataagttcgataacgtcatgaacactgctgcaaaatagccatatgcccccgcgcaggcgggggcgtttgtgttatacgtttttacgttcgatgatttgttcgccccagaagagcgagtctttgtccgttttctcaaaggctttgatcagcacctcatcgctaccttcttcccatattttttctgccagtttctcgtcatagtgagcgacttcaaaaatggcttcggcaatttccggcgacgtattacgcaggcttgcccattcgccgacgcggtgcgcttttgcttcttgagttggcattcgaatcctcctgttgaagattagccgttgagtttgactgccagaccggcgacgtattccccctgatagcgagcgatagagagttcctcctggcttggttgacgtgaaccgtcgcctccagcgatagtcgttgcgccgtaaggcgtgccgccgcgaacctgggagacgtcaaagagttcctgtgcggcatagcctatcgggacgatcaccatcccatgatgggcaagcgtagtccaggtcgaggtgatggtctgctcctggccgccgcccgttccggtagaactgaacacgctgccgagcttgccgtatagcgagccggatgcccacagtccaccggtttgatccaggaaggtacgcatctggcctgacatattgccaaaccgggttggcgtaccaaaaataatggcatcgtaatccgccagctcctgtggggtggcaaccggtgcgttttgcgttttaccgccagcttttgcgaagatttcaggcggcattgtttctggcacacgctttataatgacctctgcgccgtcgactttctttgccccttccgccaccgcgtgcgccatggtttcaatgtgtccgtacatggaataatagagcaccagaatctttgccatttgtactactcctcagattaatcaggtgtgtagcgattcgctacgtctatttaaagatatgctctcctgtgaagagtgcaaatttcagcgccatttctttgatttataacaataattaatttggcgacctttgttgcaaaatgatacatttttaagcgctttgattttcccaaatataagaataacttatttatttcttatggttattattctgcgtattcggcttccaatgttgcagaatatttcggtaagcggcctactacgacgtttttcactatgcttaatgttacgcggcgttactgatgatatcgttcatacgctgcgcgaggagatactcctcattacctatgcaatatgatgtctaatctatgacggaggtcagtaatggcaaaccatcgtggcggttccggtaattttgcggaagaccgcgaaagagcatcagaagcaggtcgtaaaggtggtcagcacagcgggggcaattttaagaatgacccgcagcgtgcatccgaagcaggcaaaaaagggggcaaaagcagtaaccgtaatagctagcctgcgtcacaacagcaagacgctgagcgtttcgcgctaaaaagtgtcatgcgccaccgccgccggatttccggcggtttttttgtttataagccggatttggtatgcttgcgtcctgacaaaaaggagagggcgcatgtcgcaacgcacagagaaaaaaatcgggaaacgctcgcaggccaccggtgcaaaacggcagcttatcttaaccgccgcgcttgctgttttttcccagtatggcattcatggcgcgcgtcttgagcaggtcgccgagcgggcaggcgtctccaaaaccaatctgctttattattatccctcgaaagaggcgctgtatgtcgcggtaatgcgacagattctggatgtctggctggcgccgctcaaggcgtttcgcgcagaattttcccctctggaggccatcaaagagtatatccgtctcaagctggaagtttcgcgtgattatccgcaggcgtcgcggctcttctgcatggagatgctggcgggcgcgccgctcttaatggaggaactgaccggcgatctaaaagcgttgatagatgaaaaatccgcgctgattgccggatgggtgcacagcgggaaactggcgcccatttctccgcaccatttgatcttcatgatttgggccgccacgcaacattacgccgattttgcccctcaggttgaggcggtaaccggcgcgacgcttcgcgatgaagccttttttaaccaaacggtcgaaagcgttcagcgcattattattgaagggattcgcgtgcgttaaccggctggcggcagtgggcagctcaaatccccctcttcacattgcagcagcgaggctaaaaacgcttcgcgttcgttcgttttatcggtcaggcactggctggcgatcatgggttgcacgctgccgccctccgtacctgagcgaatcagcgcgcaatcggcgtcgcgcagggcaatccatgccacctgtgctttttgtaacagctcgcgctgcggcggttgcgcacgcttaagcgcgctttgataggtttcgttcagctttttatctgccgcctggtattgcgcggcggcgcagcgattcatttccagctgcgtactggcgctggcacactcatcggccaacgcctgactgctgatcaacaacgccgcgcaggtaaggaaaattcgtttcatacggtcctctgacgcgagtaaaaaggctccattgacggagccttaattaaccacagtattagccaattgtcatcaggctggcattaccgccagcggcggcagtgtttacgctcagcgaacgttcaatatagagccgttccagcagtatattgctttcgccgcgggcgaacccctgtaccgacactatcgcgccttcgcgggcggcgacggcttcgcacacggttcgcagcttgtcggagtcgccgtggaaaatcaccgcgtcaaacggctgcgccatcagcgtttccgctttcgcaaactggacacgcgccgcgacggcggcggggagacgtttcgccagatcgcggtggaaggcgtcgtctgaccatagcgcctgactgccgacggcgagaacggcggcaagctgcgtcaacgcgtcctgttcatcatcagccaggcataatacccgttcacgcggcaacaacgtccaggtattgcgctcgccggtcggccccggtagcaggcgctgcgtgccggcctgggccagatcggcgaattgtcggcagagcgtctgtagcgccgggcgatccgccgcccattgtgtcagggcggtcaacggcgcgagtagcgtggttttaagctgcgcatccaccgggtaacgcgcatcctgacgagtcagcgtcgtattgagcgcattgggcgggcggtgtgccagcaggcggtagagatagagcggtcctcccgcttttggcccggtgccggacaggccttcgccgccaaacggctggacgccgacgaccgcgcccaccatattacggttaacgtacaggttgccgacatgggcggaaccggtgacttgcgcaatggtttcatcaatacgggtatgtacgcccagcgttagcccgtagccggaagcgttaatctgttcgataagctccgccagttggttacggttataacgcacgacgtgcagcacgggcccgaagacctctttttccagttctgcgaagttttccagctcaataagcgtgggcataacaaacgtaccggtctgccattcctgcgcatcatcgctgttttcacgtgcggcctggaaaaccgggcggcctttggcgcgcatcgtctggatgtgacgttcaatgttggctttggcctcgctatcgatcaccggcccgatatcggtcgtcagacggcctggattccccatccgacactccgccatcgcgccgcgtaacattttcagcgtatgttcggcgatatcgtcctgcaaacacagcacgcggagcgcggaacagcgttgtccggcgctgtcgaaagcggaagccagcacatccacgaccacctgctcggtgagcgcggaagagtcgacaatcatagcgttcataccgccggtttccgcaatcaacggaatagggcggccctgggcgtcaagacgcgtggcgatgttgcgctgcaacaacgtcgcgacctccgtggagccggtaaacatcacgccgcgtacacgcgcatcggcggtaagctgggcgccgacggtttctccccgtcccggcaacagttgcacgacgcccggcggtacgcccgcttccagcaaaatggcaatgccctgggcggcaatcagcgatgtctgctctgccggtttcgccagaacgctgttacctgccgccagcgcggcggcgatttggccggtgaaaatggccagcgggaagttccacggactgatgcagactaccggccctaacgggcgatgcgtttcgttatcgaaatcgtcacgcacttgaccggcataataatggaggaagtctaccgcttcgcgcacttcggcaatggcgttgctgaacgttttccccgcttcacgcaccaacaggccaatcaactgctgcatttggtcttccattaataccgccgcccgctgcaaaatagcggcgcgttcttgcggcggcgtcgcaaaccaaaccggcgcctgattgaccgcgttttgcaatgcctgttcaacctcgctttctgtcgcttcgcgtccccagccaacaatatctttcggttccgccgggttgataaccggcgtcatctcaccgtcggccaccggttgttccagcacaggtttggcctgccatttctgcatggcgttgcttaacagggcagaagaaagcgaggcgaggcgatgttcattcgctaaatcaagtccggcggagtttatccgaccttcgccgtacagatcgcgcggcagcggaattttcggatgcggtatgccagcctgaccttcctgctgcgccagtttttccacggcctcgaccgggtccgccaccagttcatcgagcggtagggtggcatcggcgatacggttgacaaaagaggtgttggcgccgttttccagcaggcgtcgtaccagataggccagcagggtttcgtgtgttcccaccggcgcgtaaatacggcagggacggttaagttttccgtccgccactttaccggtgacctgttcatacagcggttcgcccatgccgtgcaggcactggaattcgtactgacccggatagtaattttgcccggccagatgataaatcgccgccagtgtgtgagcgttatgggtcgcgaactgcgggtagatcagattagggacggcgagcagttttttcgcgcaggccagataagagacatcggtatacactttgcgggtataaaccggatagccctccagcccttccatttgcgcgcgtttgatctcgctatcccagtaggcgcctttcaccagacgaatcatcagccgacggcggctacgggaggccagatcgactaaataatcaatgaccagcgggcagcgtttctggtaagcctgaatcacaaagccaatgccgttccagcccgccagttcgggttcgaagcagagtttttccagcagatcgagcgagatctccagacgatccgcctcttcggcgtcgatattgagaccaatgtcgtactggcgcgccagcagcgtcagggatttcaggcgcggataaagctcctccattacccgatcgtattgcgcgcgactatagcgtggatgcagggcggacagcttaatcgagatgcctggcccttcgtaaataccgcgaccgttagacgctttgccgatggcatgaatcgcttgctggtaagaaaccatataggcctgcgcatcggcggcggttaacgcggcttcgcccagcatatcgtaagaatagcggaaccctttctcttccagttttcgggcattcgccagcgcctgagcaatggtttcgccagtcacgaactgctcgcccattaaacgcatcgccatgtcgacgcctttgcggattaacggctcgccgctcttgccgataatgcggttcagcgagcgcgatagattggcttcgttatgcgttgagaccagtcggccggtaaagagcagcccccaggtggcggcgtttacaaacagcgacgggctacggccaatatgcgactgccagttgccattactgattttgtcgcgaattaacgcatcgcgcgtagctttgtcgggaatacgcagcagcgcttccgccagacacatcagcgctacgccttcttgcgaagagagggaaaactcctgcaacaggccttgcaccatacccgcgcgaccgctggcggatttttgattgcgcaatttctccgccagttgatacgccagtttatgcgcctgctcagcgacaggcggcgacaggcgcgcctgttccattagcattgacaccgcatcggtttccgggcggcgccaggcggcggtgatggcggcgcgagagacggattggggaagaatttgttcggcaaactccagaaagggctgatgcggctcatcctgcggcgcgaccggctcctcgctttcatttgccgcgccgacaaacagcgcaggtagctccggtagcgtatcgctattttccagcttgtccagatagctaaagattgcctgttttattaaccagtgcggcgtgcgatcgatacgcgacgcggccattttgatccgttcgcgcgtggcgtcgtccagcttaacccccatcgtggtggttcccataccctctactcctgttattcgctctatctgctaaccaatagttagcggaaaatatccaccatgttgcaactttgtgcaaccgcgttaaatgtgacctgcgttgcaagcttaaaaatgaatgaattgttaaaaaaagataagggagtgtctgacgagaaaaccatctggatttattttctctgcggtagttaacacttttaaaaggtgcaaccgcaaaaaatgtgagagagtgcaacctggagaaaaatagtatccctctgcaatcaaatttgatgtaaatggtgtgttaaatcgattgtgaataaccaccgcttccggcaggatacggtcgccctggtaaacataacacccttgccacgttccggcagggtacaaaacggcacgctacggtagtgccaataaataaatttggagaaccttgatggctattagcacaccgatgttggtgacattctgtgtctatatttttggcatgatattgattgggtttatcgcctggcgctcaaccaaaaactttgatgactatattcttggcggtcgcagtctggggccgtttgttacggctttatcagccggcgcgtcggatatgagcggctggctgttaatggggctgcctggcgctatctttctgtcggggatctctgaaagctggatcgccattggcctgacgttaggcgcatggattaactggaagctggtggccgggcgcctgcgcgtgcataccgaatttaacaataacgcgctcacgctgccggactattttaccggtcggtttgaggataagagccgagtcctgcgtattatttccgcgctggtcattctgttgtttttcactatctattgcgcgtcaggtattgtcgctggggcacgactgttcgaaagcaccttcggtatgagctatgaaaccgcactgtgggcgggggccgcggcaaccattatttatacctttatcggcgggttccttgccgttagctggacggataccgttcaggccagcctgatgatttttgcgttaatcctgacgccggtgatggttattgttggcgtaggcggtttcagcgagtcgctggaggtgatcaagcaaaagagcatcgagaatgtcgacatgctcaaggggctgaattttgtcgctattatttccctgatgggctggggactgggttacttcggtcagccgcatatcctggcgcgctttatggcggcggactcccatcacagcattgttcatgcgcgtcgtatcagtatgacctggatgattctgtgtctggcgggcgcggtggcggtgggcttctttggcattgcgtactttaacaataaccccgcactggccggggcggtgaaccaaaactcagaacgcgtatttattgaactggcgcagatcctgtttaacccgtggattgccggtgttctgctgtctgctatcctggcggcggtgatgtcgacgttgagctgtcagttgctggtatgctccagcgcgattacagaagatttatataaggcttttctgcgtaaaagcgccagccagcaagagctggtatgggtagggcgagtgatggtgctggtggtagcgctgatcgccattgcgctggcggcgaatcccgataaccgtgtgctggggctggtgagctacgcctgggctggattcggcgcggcatttggacctgttgtcctgttttctgtgatgtggtcgcgtatgacacgtaacggcgcgctggcgggaatgattattggcgcggtgacggttatcgtctggaaacaatatggctggctggatctgtatgagattatccctggcttcattttcggcagcctggggatcgtaatctttagcctgcttggcaaagcgccgacagcagcgatgcaggaacgctttgcaaaagcggacgcgcattatcattccgcgccgccgtcgaagctacaggcggaataaccgacatgtccgatagcattattgccatcggacatattttaccaggcggcgttatacgcccgcctggtcctctgataagtcccggaccgattgactgaagatgttcaggtaaatgaggacgcactctcaaactatttttagcccttgagcgccgttaacgcgggcgtaatacatctcgagtaatcactaactagccatatatgaaatcgcctgttaatggtaccaatagccttgacgcaatagagtaatgacaaaaattaaaacaagtcagcgttactggcgtaagtatgccgcataaaattttgcataaataatgccgttttagcgatgggagagaggacacgttaattattccattttaaccttatatatgttcaatattcaatgggttatggatgttttcagcattaatacccgcagtagctaatgattatcttttttagtctcctgccgatgaaataatcgtgtaatctttctgtaagagactgacaatgacgcaataatgtttggttaatgcttggtgaatatattgttgcattattgatgttttgtgttgtacttagtagtaatagcggtagttccccggcagtgatggtcactcactatggagatcgcgaatggtaatgtccgcaccaggacacattgtttacagtagttacaacaccctgtacggacattctctctccggtggtggtcttgtcatcttaaaagctctcatcatttcccttactgaccatacccatgacgtcatatgtggtgcgcgtagccgtgtgtggcgtcgtttcaaaaagcaagctaaggcttacaaggaagccaaccctcagatgtgtgtgcgcataatcgcgttcaagagaacgcgggtgatgtatacctacaactcaaggtgctatccatgggaagacaaaaagcagtgatcaaagctcgtcgtgaagcaaagcgtgtgttgagacgagattcgcgtagtcataagcaacgtgaagaagaatcggtcacgtcactggtacagatgggcggagtagaagccattggcatggcgcgcgatagtcgcgatacctctcctgttaaggcgcgaaatgaagcacaggcgcattatctgaacgctatcgacagtaaacagcttatttttgcgaccggcgaagccggctgcgggaaaacatggatcagtgcggcaaaggcggcagaagcattgattcataaggacgtcgagaggatcattgtgacgcgtccggtattgcaagctgatgaagaccttggttttttgcccggtgatatcgctgaaaaattcgcgccttattttcgtcccgtctacgatgtcctgcttaaacggttgggcgcgtcctttatgcaatattgtttgcgcccggaaatcggtaaggtagaaattgccccgttcgcctatatgcgtgggcgtacttttgaaaatgcggtcgtgatcctcgatgaggcgcaaaatgtgactgcggcgcaaatgaaaatgtttttgacgcgattaggcgaaaatgtcacggtcattgtcaatggcgatattacgcaatgcgacctgccgcgcggcgtgcgttccgggttgagcgatgcgttggaacgctttgaagaagatgaaatggtagggattgtgcatttcaacaaagacgactgcgtgcgctcggcgctttgtcagcgaacgcttcacgcatacagctaatatagcattgactttcagagcccgggaaaccgggctttgttatctataaagcatccagcagactcatggacaaaaaaggaaaatgacgcctgtacgtgaagggaattattttgtcatgtccagggcattcattgtccgtaatttgctttctcgggcctgttccggcgaggactgtacaagaagggtatagagcaggtcaaagacgaaaagctgcgcggctttcgtaccgatcgagtcaccctgcaacattccttgccgattaccattgatcaggcaaaaatcggcctcttcacataatggagaacccagattatgggtaatggcgactgtggtggcgccagcctgtcgggccaatcggagtgaatgcactgtttctggcgatgtgcccgagtgactgacacccatcgcgacatcgcctgcttttaatagcgtagcctgcatgtacataaaatggttattgcttaccgcatcgccccgtaaaccaatacgcattagcttgtgtttcatatccagcgccgtgatccccgatgagcccacaccaaagatataaactgagtgacagtgacgtagggcatccacgacaccgagaacctgttgcatatcaagcagatttagcgtttcagataatacattactaatggtgttctgcaattttaaaccaatggcgtgggcatcgtcggattcgctaacttcggcatccagtagaggactactgtcatcagactcggtagtggcaagttcaatggccaggtccattttaaaatcctgaaaacctttatagcccagggtgcgacaaaagcgaataaccgtggcttctccggcctgtgtttcgcgcgacaaatcggcaatagatgactgtgtcacctgtctggggaaggctaaaatatattgcgcaatacgctgggaggcacgtgtcaggcttttttgcatagcacccagagtatcaaggatttttccgggtttaagacgtgggggttgaggctccatatagttcctgctcttgagggctgattgcggcacaaagcctgcaatatcgaacagagcagagcctatcaagtctgcggcatgaaaaaaagcgcgatgtaagtaaaggagggggaatatttacatcgcgttgccaacttatgacagaacatcactggagagtaatctgttgctcttacggtgtttatagcgcgccatttgacggatggtttatacctggcccggtattgtcgccccgcgcgttggcgtcaccgtatgctgtgtcggtatagcgtggtatcatgaaatcataatgtcacctttggttcaggtttttcatccagcgtcaatggcggtgccggggcaaataacggggcgaaaataacgccgctgatcaccacgcttagcgagccaatgaccccataaaagaagaagttaaggtcagtggcatagcgtgcgcccagcacggtaatgacgctgataataattcctaaaaccgcactcccggcatttgctcgtttaaagaaaatgcccagcatgaacagaccggtcattggccctcccatcagacctatcagactattaaatgcatcccagatttctgattcatcggccatgaccagccataccgaggccgcgctacttatcaagcccgcgaccagaataactaacttagctattttcatacggttttctggcgttctttttttatgactcaaacgctgatagatatcggaattaaaacaactggaaatgctgtttaagctgctggagatactggactgcgcagcagcgaaaatagcggcgattatcaaccctgcaatgccgactggcatttcggtgaccacgaataagggcaaaatgccgccagtgttgaatcccgccggtaataattgtggatgttgctgataatagacaaacaatgccgagccgatagcaaaaaagaaaacagggatcacagcaaccagtttggcatttgtaagtaatgttttcttcgtttcctctatggagtcagtcacgatatagcgttggaccacatcctgactggcagtaaattgctgaatattggcaaacagaaaaccaatcatcaatacaggtactgtgctttccgtccagctccagtggaactgcgtagccggaaagaatttatccgcctgctgcgtcaccgtaaaaatttcatcaatgccgccctggactttgagacatatcactataaaaatcagtatcgcgctgccagaaagtaagaggccttgaataacatcagtccatattactccttcaattccacccatccaggtataaatgatacacatcacgctaatcaacagtaccaaaatcaccgggtctatagcgatgaaggggcgcaaggccagcacggtgaggaaagtgataatggcgatacgtccaatatgaaacaacataaatgacatgctggcgaacagacggcagcgcacatcgaaccgtgcttcgagatattcataggctgatgtgactttcaatttccgaaaaaacggaatatagaaataaaaaaccagcggtaaaattgcgatagccagatactgaccaatgataaacgtccagtcggaagtaaacgctttggcaggaattgacataaatgtaattgagcttaacgtagtagcaaatacactgaccccagccgcccaaccaggaacccggccaccaccgcgaaaataatcgtctgctgttttttgccgtctggaaaaatagacaccgactaacatcatggccaggaggtagccaaataatacaagataattaacgatgccgaaagaatgtgtaatcatagttctttcctgcttatggttttgagtagagttgcggtcatcgtctgtgtatttttatcttcccatcattcagacgatacgatattcagatcaagtaatagtttttgttaatctcaatgacggtaatcatgagatgtaaaaggcagagcatttatgctccaccaatggtgatgcccagacgtatgtcctgccggatacctgaaatagcagatatccgatattgcgttcaaacaggcttcaggcctgggtctcgtatttgccgatagcattattaacgtcggattattctctgaggcataaatatcaatagtaagcgtgttcattttcttttcctgttcagcgttttactgcgtgactgaaccactgacagatatgctcaatacgggtgatagcggaaccaacggtaactgcccaggcaccatgctcaatagcattggccgccagtgcaggcgtgttatagcgcccctcggcaataacacgacaacctgcatggctcagttgtgtcaccattgccaaatctggctcaaccggcgtgatggggccggtatagccagacagtgttgtaccaatgaattcgattcctttctgatggcaacttatgccttcattcacggttgaacagtctgccatcgccagtaatccatgcaggcgaatacgtgtcagtaaactatcaatatcaaccgggcgagagcggaatgaggcatcaaaagcgataatatcggcacctgcctgcgccagggcgtcaacatcctgtaaatatggagtgatacggactggcgaccctgtaaggtcacgtttaattatcccaataataggaacagaaagatggggacgaacagtccgcagattctcaatgccttcaatgcgcacagcgaccgcacccgccgaagccgctgcctgtgccattgcagccacaatttcaggtttatccatagggctgcctggtaccggttggcatgagacaatcagcccaccgttttcgtgtacactttgttccagcctggctaatagtgacatccagttccgccttatatatttgaagttttgctccgttttatgttatgtcttggagtgttgctacatcaagcaaaaagatagaaaaatgtgaacacagtcataaggtatgtttgttattcaattactgcgccagcggatttgaggctataacctgaagctacaagacaaatacaattcattctgacggcagcatgctgtattttattaactgcttccggcataaagataaaatgctcagaaggagcttatacgccacgggatagccagtatgaaatgcatcacataattcttgttgtatttattcagaatgctatcactaatgagtttggccataacagatcacccataatcacttctaacatcaccatggggtgcttttacctcgcacatgataactccatgtaattatttttagcgcttggtcacattttgtcattgtcattgttgaaattgtgcaccataagatcactaatgatgaagctttactccaattgtatttcttcgcatggggatgcagatgaaaaattttaagaaaatgatgacgctaatggcgctatgtttctcagttgctatcaccacatcaggatatgcaacgacgcttcctgatataccagaaccactgaaaaatggtactggcgctattgataataatggcgtgatttatgtcggcttaggtaccgcagggacatcctggtataaaattgatcttaaaaagcaacataaagactgggagcgtataaagtcgtttcctggtggagctcgtgagcaatccgtgtcggtatttttaaatgatgagctttatgtttttggtggcgtagggaaaaaaaacagtgaatcaccgttgcaggtttatagcgatgtgtacaaatactcaccggtgaaaaatacatggcaaaaagttgacactatatctccagttggattaacagggcatacgggagtaaaattaaatgaaacgatggtacttattaccggaggggttaatgagcatatctttgataagtattttattgatatagcggctgcggctgcggatgaaagtgaaaaaaataaagtcatctataattattttaataaacctgccaaagattatttttttaataaaatcgtatttatctacaatgctaaagagaacacatggaagaatgccggtgagctgccaggcgcggggacggcaggatcgtcatcggtaatgggaaataatttcctgatgctgattaatggtgagctcaaaccgggtttacgtaccgatgtgatttaccgcgccatgtgggataacgataagctaacatggttgaagaacagccagttaccgccatcgcctggagaacaacagcaggaagggttggccggagcattttcgggctatagtcacggtgtcctgcttgtcggtggtggcgcgaattttccgggagcaaaacaaaattatactaatggaaagttttattcccacgaagggataaataaaaaatggcgagatgaagtctatggtttgattaatggtcattggcaatatatgggtaaaatgaaacaacctctcggctatggtgtatcagtaagttatggtgatgaagttttccttattggtggtgaaaatgctaaagggaaacctgtttcgtctgtaacctcctttaccatgcgtgatggtaatttattaataaaataattttttaaatacaaaaataaagttaattgatgagcggagtattttatgaaaatcaacaaatatcttctgggtatggtttcgtttatagcattttcatcatatctacaagcggcaacccttgattatcggcatgaatatgctgatagaaccagaattaataaagaccgtattgctataattgaaaagcttcctaacggcattggtttttatgtcgatgccagcgttaaatcgggaggagtagatggtgagcaggataagcatttaagcgatctcgtcgcaaacgctatagaactgggcgtaagttataattataaagttacggacaattttgttttgcagcctggatttatatttgaaagcggtccagacacttcaatttataagccttatttaagggggcaatataattttgattctggtgtttatatggctggtcgttaccgttatgactatgcaaggaagacagctaactatagtgatgatgagaaaacgaatagatttgatacttatataggttatgtttttgatgagttgaaattagaatataactttacctggatggatagcgatcaaattaaatttgataacaaaaaaacaaactatgaacataatgtggctttagcctggaaactgaataagtcatttacaccatacgttgaggtcggaaatgtagcggtgagaaataataccgatgagagacagacccgttatcgcgttggattacaataccacttttgagaaaggttaaagagttactgtactaatctttgcttagtattcatatcgataatcttatagcccgtagctacgttacagaacgttagactttgtcttgagtattcacgtccttaacgtagctacgaacaaggatgataaacaatgaatatacgccttacatagctacgatctcaggcggttgtcggaaagtgccgattgatagtgtcttattcggcaattgatatgacttaaaaattaattccgtaagcatttcagacggtaacagcaaataagggttttattgtgatagcaaaattcttcccgtggtatagcgagataactcgtccacaaaaaaatgctttattttcagcatggctgggttacgtttttgacggcttcgactttatgctgattttctacattatgtatctgatcaaggctgacttaggattgacagatatggagggcgcattccttgccacagcggcctttattgggcgaccatttggcggggcgctatttggtctgctggcagacaaatttggccgtaagccgttgatgatgtggtcgatagttgcctattctgtaggtacagggttaagtggcctggcttccggtgtaattatgctgacgcttagtcgcttcattgtcggtatggggatggcgggggagtatgcttgcgcttctacttatgccgtggaaagttggccaaagcatttaaaatctaaagcgagcgcatttctggtttcaggtttcggtattggtaacatcatagcagcctattttatgccgtcatttgccgaagcgtatggttggcgtgctgctttttttgtcggtttgctacccgttcttttagtaatctacatccgggccagggctcctgaatctaaagagtgggaagaagctaaactcagtggtcccggaaagcattcacaaagtgcctggtcagttttctctttgtcaatgaaagggctatttaatcgagctcaatttccactgacattatgtgtatttattgttctgttctctattttcggcgcaaactggccgatctttggtctactgcctacatatttgacgggagagggctttgatacgggcgtggtctctaatttaatgacggcggcggcattcggcactgtattgggaaatatcgtttggggtctgtgcgcagatagaattggtttgaagaaaacgttcagcattggtcttctcatgtcctttttattcattttcccgttattcagaattccgcaagataattatttactgctgggcgcatgtttattcggtttaatggcgactaacgtaggtgttggcgggttggttcccaaatttctctacgactactttcctcttgaggttcgtggtttgggtaccgggctgatttataatcttgctgcgacatcaggcatattcaattcaatggcggcgacctggcttggaataacaatggggctaggcgctgcgctaacgttcattgttgctttctggaccgcaacaattctactcattattggcctatccattccggatagactaaaagcacgtcgtgaaagttttcaatcaacaaaagaattttaatagaggataaatgatgacgaaatacggtgttgtaggtacaggttattttggcgctgaactggcgcgatttatgtctaaggttgaaggggcgaaaatcactgcgatttacgatccggtaaatgcggctccgatagcgaaagagttgaactgtgtcgccactgcaacgatggaggcgctttgttcccatcctgatgtggattgcgtaattattgcttcaccaaattacttacataaagcgccagtcattgcggcggctaaagcgggtaaacacgtgttttgtgaaaaacctatcgccttaaattaccaggattgtaaggatatggttgatgcctgcaaagaagctggtgttacctttatggcgggtcacgttatgaacttttttcacggggttcgccacgctaaagcgctcatcaaagctggtgaaattggtgaagttacacaagttcacactaaacgtaatggttttgaagacgtgcaggatgagatctcatggaagaagattcgcgcaaagtcaggtgggcatctgtatcatcacattcacgagctagattgtacactgttcatcatggatgaaaccccatccctggtttcaatggcggcggggaatgttgcgcacaaaggtgaaaaatttggtgatgaagatgatgttgtcctaatcacccttgagtttgaaagcggtcgtttcgcgacacttcagtggggatcatcgttccactaccctgagcactatgtattaattgagggcacgacaggtgcaattctcattgatatgcaaaacacggctggttatctaataaaagcgggcaaaaaaacacactttcttgtgcatgaaagccaggcggaggatgatgatcgtcgcaacggtaacatatccagcgagatggatggcgcaatcgcttatggtaaacccggtaaacgtacgccgatgtggctctcatcaattatgaaactggagatgcagtacttgcatgatgtgataaacggtctggagccaggcgaggagtttgctaaattgctaacgggagaagcggcgacaaatgccattgctaccgctgatgctgcgacgctttcctcaaacgaggggcgcaaagtaaaactcactgaaattcttggctaaaattgaaagccggatggtggtgttattggccggtggcgctgcgcttatgtagaccggataaggcgcccgtgaactgtgccgccatccggcaatggacggggcacatataagcaaaaagcccgtacttctgtacaggctctcaacttaaatatggcggtgagggggggattgactcgctgcgctcgcccttcgggcagtctcctcgcaagctcgtcgtctgtccaactggctgcgccagttgtcgaaccccggtcggtggttctcatccccccttagtttgggggatacatataagcaaaaagcccgtacttctgtacaggctctcaacttaaatatggcggtgagggggggattcgaacccccgatacgttgccgtatacacactttccaggcgtgctccttcagccactcggacacctcaccaaattgtcgctccagcattactggaacgggcgctaatgtagggaaatatccattctacgtcaatcaacttttttcaaaaaaaagcgcgtttatacaaacttccaccaatctgtggttttaataagcgaaaactgctttttttgcccgcgccgggaaatttgctatgctgcacatcccgttgaaaacgctgataacaggcgcaatcacattccgcacaatactgctcaggagataacatggagataattttttatcacccgacatttaacgccgcctggtgggtaaatgcgctggagaaggctctcccacatgcgcgcgttcgtgaatggaaggtcggtgataacaaccccgcagactatgcgcttgtatggcagcccccggttgaaatgctggccggaagacgcttaaaagccgtctttgtgctgggcgcgggggtggatgcaattctgagtaaattaaatgcgcatccggaaatgctggacgcctccattcctctattccgtctggaagataccggaatgggcctgcaaatgcaggagtatgccgtcagccaggtattacactggttccgtcgtttcgatgattatcaggcgctgaaaaatcaggcgctatggaaaccgttgccggaatatacccgcgaagagtttagcgtcggtatcatgggcgcaggggtactgggcgcaaaagtggcagaaagtctacaggcgtgggggttcccgttacgttgctggagtcgtagccgcaaatcctggcctggcgtggaaagttatgtagggcgtgaagagctgcgcgctttcctgaaccagacgcgggtgctgattaatctgctgccgaatacggcccaaacggtaggaattattaatagcgaattgttggatcaattgccggatggcgcttacgtgctgaatctcgcgcgcggcgttcatgttcaggaggcggatctgctggctgcgcttgatagcggtaagctaaaaggcgcgatgttggatgtctttagccaggaaccgttaccgcaggaaagtccattatggcgccatccgcgagtcgccatgacgccgcacattgcggcagtcacccgtccggcggaagccatcgattatattagccgcaccattacccagctggagaagggagagccggtgacggggcaggtggatcgggcgagaggatattgatatcaacccggcgcgggccgggtttcgctaaaaaacgctggcgatacctgctatccttgtcggaaatgactacaggagagagcaatgtatcccgttgacctgcatatgcataccgtcgccagcactcatgcctacagtactctgagcgattatatcgcggaagccaaacgcaaaggcattaaactttttgcgattaccgatcatggtccggacatggaagatgcgccgcatcactggcattttattaacatgcgcatctggccgcgtctggttgacggcgtggggatactgcgtggcattgaggcgaatatcaagaatattaacggtgaaattgattgttccggaaagatgttcgactcgctggatctgattatcgcaggctttcatgagcccgtttttgcgccgcatgataaagaaaccaatactcaggcgatgatcgcgaccatcgccagcggcaaggtgcatataattagtcaccccggaaatccaaagtatccagtggaggttaaagccatcgcgcaggcggcggcgaaacaccatgtagcgctggaaatcaacaactcttcttttctgcattcgcgtaaaggaagcgaagataattgccgcgcggtcgctgccgccgtacgcgatgcgggaggctgggtagcgttaggctctgattcccatacggcctttacgcttggcgatttcaccgaatgccggaaaattctggatgcggtgaattttccggaagatcgaatcctgaacgtctcgccgcagcgcttactggcctttctcgaatcacgcggtatggcgcctgtaccggaatttgccgaactttaatcgttatttacgggaagatatcaatgaatgagttttcaatcctgtgccgtgtgctgggatcgttgttttaccgccaaccgcaagatcctttactggttccgctgtttacgttaatccgtgaaggtaaactggcggcaaactggccgctggagcaggatgacatgctggcgcgtttacagaaaagctgcgatatcacgcagatttccactgattacaatgcgttatttgttggggaagagtgcgcggtagcgccataccgcagtgcgtgggtcgaaggcgcggaagagtctgaggtgcgcgcttttttaacgtcgcgagggatgccgctggccgatacgcctgccgatcacattggcactttattgctcgcggcctcctggctggaagatcagtctgccgaagatgaaagtgaagcgctggaaaccttatttgccgattatctgcttccctggtgcaataccttcctcggtaaagttgaagcccatgccgttacgccattctggcgcactctggcgccgctaacgcgtgatgcgataggggccatgtgggatgaacttcaggaagaagatgaagaataatgtgatgtaaatcacccttaactgcaacgggttttacatcattgcataaaatgtgtgcgtgatctcattaatgtgccgcttttctgttatgatgcgcgccatgaacatacttctttctattgctatcacgacgggcatcctttctggaatatggggatgggtggctgtctccctggggttactaagctgggccggttttttaggctgtacggcttatttcgcctgtccgcagggcggctttaagggattgttgatttccgcctgtacgctgttaagcggtatggtgtgggcgctggtcattattcacggtagcgcgttggcgccgcatctggaaattgtcagttacgtgttgacggggatcgtggcattcctgatgtgtatccaggcaaagcagctattgctttcttttgttccgggaacatttatcggcgcctgcgcgacatttgcagggcagggtgactggcggttggtattaccgtcgctggcgctggggctaatctttggctatgccatgaaaaatagtgggctatggctggcatcacgccgcgagcaacattcagcgaatacggcggtcacaaaataaaaaagcgtggggttcttccccacgctttgtcgtattcatcaggattctggcggtactgacagctcacggtatttcaccagaatatcattttgcctgtccgctttattctgcaaatcccacagtccgcgatcgataccatcattaatgaggaagataacgccggtttcaatggctgacatcagacacagcatcaccggttcgttcgaggtatagccgatttcgccttccagtaagcgctggtaatcaataaaacggaacacgcctgcctgtacttcataggaaaggatcgttttactggtgttcaccgaggaaaggatctcgcccgtactgacgttaaccacgcgcaggttgacagcaatctgatccagctgatactgcgtatcggcgccaataccgaaatatcttgcgccgaccccgccggatttgacgttactttcataaccaataatagaaccttccaccataatatttgccgccgtcagcgactgaagcgggatacggttattcatcgccacggtgccgttttcctgggctgcgcgaataattttccgttcattcaaaagattctgtaagccttgtcgttccagcgggataaaccagcgcgaatctttcagcgcagtgaccaacatagcggtggcgctctgcggcacagccgtagaaaagttacttgccgggtaaggtttaaattggcccgtttcatcctgaatgttatataccgaaacaaagatcttaccggtgggagcaggtaagtgcgtcaaatctttgtaactttgtgcgcggggcattaatgtcggtttcgcagcttgtttcggcggggcagttaagcatccgctcaacaataaaacggcaaccaaaataagtaagcgcggcatgatttatatcctttagtgactgtagcttaaaaatcggttgactgagtttgtaaacctgacacttcgatggtcgaggttcttcccgtttttctgtccgtgacgttgagctggagctgtccgtcgcgattagcgatatcgataataaaatcgttggtcaccatacgtcctggtttcccggtattaatattggtcaacaagccgcccagaatttgcgattgaatagcctgcgtaaagttatccaacgctgagggggtttcgataccaaaatcgttatcataagcggggtctttatatgaattttgcgcctgggcgctattcaataaaaaggaaccgttattggggtttccaccaaagttaggattacggaactggaacgtcatatttccagcccaggttaatggcgaaaaaagcatgagcagcactactgcatgtttaacacgcatgacagcctccggataaaaatcatgttttagaattcatcacgcgctaaatcactcgtacttaatagcgtttgatctatttgtcggcgatttaatgcttcctctgtttgcgctaatgcgaagacgacggttttctcgaagtctcttttcattggaaataaaaaggtctggaaaataacgtcctgatttaccgttatggtgatccagcttccccaacgcgcactgggtctttcattaatggtcagattgccggtgtattcgctttcccatttgtcgctgaatgcacgatagaattcatgtcctatcgaagagacggtatggtcggttaacaatccgggaacctcgacttcaacttcattggcatgcaggtttccggtagcgaacagtaactctgctgctacaatccaggtcagatagcgtttcatggccttaccgcctgagattatcgtttgcccatgaaactgcctgggtgcgatttttgacagctatctttttgaaaagattataaagatgtgtcttaaccgtattctcgctgataaatagcgacctcgcgatttcattattagaggcaccaatacgtaacttattgaggatctctttttcgcgatgagtgagtaatgcggactcggtgctgttgtagcggtaatttcctgagtgcgtaatcaggtaactggctaatttttgtgaaaaatagcattcgccacgcagaataccctgtaatccgctgaccacgtgttcctggtcttcagtagcgtaaaacacgccgttaatatgaggccagttttcaatttcacggtagggataatcgtcaggggtatttaacaataatgtttttatattattgtttttgcggcttaaattatcctgccaatagtggataagcttcttatccgcttccatcatatccattaaaacaatgcaaccggccgagatatcttccagagaacgttgaatattatgcagttttccggttatggccagcgattgctttaaatgttgcaataatgccgtagcttgcagagatggctttgtgatcaacaatagtgtgtgaccatgactactatggacttcattaaacatgatgaaactccactttttttaatcgcacatctgacagctgcccccataaaataaaggcaccagaagtactgacagatgttgcactgctgtgggttgaaatagcccattatccagaaagagaaaaatatttacgaaaatacttttaactgttttcaatctagccattacaaatcttaaagcaagtgttaaacttgtaaccaaatgtaaaaatatatattaaaatgttgtttttgggtttttttgaagtttagatttgatagtaaagttgtacatttcgctgttattgcatagatttaaaaaatcatacaaattataataattcattgatttttaatcattttaattattatatgttatgttttgattttattttttcttaaaatttgagacgtggcattaacctggacagcacaaagacaaaaaaaacgaagtgtgtcacgtcttgtgcgtattgccccacatgggaagcataagaacatccccatggcggcataacacacaccaacacttcattttttaggtgcgcgatacactatcttctgtggccaaaaatcaattataaaaaatcacatggctatcgttttattagcactttggtatgagcttaaataacaaaataccacgcgtgggtgagttattaaaaatgtttccacggacatactcttcatcgtaacgacgcgttaacaaaaaacgcatgtcgctaacaaggtaatagataattttcgctatgtacgaccaggtccagggtgacagcatgaaaaacaaattgttatttatgatgttgacaatactgggtgcgcctgggattgcaaccgcgacaaattatgatctggctcgttcagagtataattttgcggtaaatgaattaagcaagtcttcatttaatcaggcggccattattggtcaagtcggcacggataatagtgccagagtacgccaggaaggatcaaaactattgtccgttatttcacaagaaggaggaaataatcgggcgaaagtcgaccaggcagggaattataactttgcgtatattgagcaaacgggcaatgccaacgatgccagtatatcgcaaagcgcttacggtaatagtgcggctattatccagaaaggttctggaaataaggccaatattacccagtacggtacgcagaaaacagcagttgtagtgcagaaacagtcgcatatggctattcgcgtcacccaacgctaataccgttacgacttttaaatcaatccgatgggggttttaccatgaaacttttaaaagtggcagcattcgcagcaatcgtagtttctggcagtgctctggctggcgtcgttccacaatggggcggcggcggtaatcataacggcggcggcaatagttccggcccggattccacgttgagcatttatcagtacggttccgctaacgctgcgcttgctctgcaaagcgatgcccgtaaatctgaaacgaccattacccagagcggttatggtaacggcgccgatgtaggccagggtgcggataacagtactattgaactgactcagaatggtttcagaaacaatgccaccatcgaccagtggaacgctaaaaactccgatattactgtcggtcaatacggcggtaataacgccgcgctggttaatcagaccgcatctgattccagcgtaatggtgcgtcaggttggttttggcaacaacgccacggctaaccagtattaatttagcgtctgcgctaataaaaaaacagggcataagccctgttttttttcgggaggaaattatgcatactttattgctccttgccgcactttcaaatcagattacgtttaccacgactcagcaaggcgatatttacacggtgatccctcaggtcacattaaacgaaccctgcgtctgtcaggtgcaaattctctctgtgcgcgacggcgtcgggggacaaagccatacacagcaaaaacaaacgctatctttacctgctaatcaaccgattgagttgtctcgtcttagtgtaaatatatcttcagaggactcggttaaaattattgttactgtttcggacggacaatcactgcatttatcacaacaatggccgccttctgcacagtagtttttgatggtggcggaaatggattggctgacctgggtataaagaggcgataaaagcgtctcatcgtctcggcatgtcgctataaggtaacgccgaaccctcgaggatgactaatcattgaggagttaacatgtccgtaatcaagaaaaatatccctgccataggcctgtgtatctgcgctttttttatccattctgcggtagggcaacaaacggtacagggcggcgttatccattttcgcggcgcgattgttgagccactgtgcgatatttctactcacgccgaaaatattgatttaacctgcctacgcgaaggtaaaaagcaaatgcaccggattgaccttcggcaggcatctggattaccgcaggatattcagtccattgcgacggtacggctgcattatctcgatgcgcaaaaaagcctggcggtgatgaatattgagtaccgttaacggcggtgtcatagatataaaaagagcgactctgttgaaagccctgctgtacactttgcagataaggtgagacaaagggggggggggttatgacatcacgtcttcaggtcatacagggtgatatcactcaacttagcgtcgatgcgattgtgaatgccgctaacgcatcattaatgggcggcggtggcgtagacggcgcgattcatcgcgcggcggggccggcattgctggacgcctgtaaactcatccgtcagcaacagggcgaatgtcagacgggacatgcggttatcacgcctgctggcaagctttcggcaaaggcggttattcacacagtggggcccgtctggcgaggcggcgaacaccaggaagctgagctactcgaagaggcataccggaattgtttgctgcttgccgaggcgaatcactttcgttccatcgcttttccggcaatcagtaccggcgtttatggctatccacgcgcccaggccgctgaagtcgccgtcaggacggtttcagattttattacccgttacgctctgcctgaacaggtatactttgtctgttatgatgaagaaactgcccggctttacgcaagattacttactcagcaaggcgacgaccctgcctgataaaacacgcctggagcgtgccgttgaaccgctatgcgcgcgccatcccggagagtgcggcattctcgcgctggataacagtctggacgcttttgccgcccgctaccgcctgaccgaaatggcggcgcggacgctggatgtgcagtattatatttgggaagacgatatgtccgggcggctgctcttttcggtactgctgtcggcggcgaagcgcggcgttcatgttcgtctgctgctggatgataacaatacgcctggtctggatgatacgttgcgcttgctggatagccatcctaatatcgaagttcgtctgtttaatcctttctcttttcgtacgctacgcgcgctgggatatttgacggattttgcgcggctgaatcggcggatgcacaataaaagttacactgccgacggcgtagtgacgctggtcggtgggcgcaacatcggcgatgcctatttcggcgctggcgaggagccgctattttccgatctggacgtgatggccattggcccggtggtcaatgatgtcgccaatgattttgaacgttactggcgctgtagttcagtgtcgacattgcagcaagtattatccctttctgagcaggaactgacgcagcgtatcgaacttcccgaatcctggtataacgatgagatcacccgccgttatctgcataagctggaaaccagccagtttatggcggatctcgatcgcggaacgttgccgctgatttgggcaaaaacacgcttgcttagcgatgacccttctaaaggcgaggggaaggcgcagcgccattcgcttcttccgcagcgattatttgacgtgatggggtcgccgacggagcgtatcgacattatttccgcttactttgtccctacgcgcgcaggcgtggcgcagttgcttaatctggtcaggaaaggcgtgaagatcgccatcttaactaactctctggcggccaacgatgtggcggtcgttcacgcagggtacgcgcgctggcgcaagaaattactgcgctatggcgtggagctctacgaactgaaaccgacccgcgaacatgaaaccgccgtacatgatcgcggactcaccgggaactcaggttccagcttacatgctaaaacgttcagtattgatggtagtaaggtgtttatcgggtcgcttaattttgatccccgttcaacgcttttaaataccgaaatgggctttgtcattgaaagtgaaacgctggcgacgcttatccataagcgttttacacagagccaacgcgatgcggcctggcaactgcggctggatcgctggggacgaattaactggatcgatcgtcagcaagaagaggaaaaggtgttaaagaaagaacccgctacgcgtttctggcaacgagttctggtacggttggcggcaattttacctgtggaatggttgctgtgaacccacgcgcggaaaactacccgatcgtggcgcgactttctcgttttaccggcggtttacctgaaaagagaaatttcaggagcgggatgcgtaaatgaatttcatacagaattaacgcaatacccataacaaatatcagcccgcacaagaacccgatcaggttggaggagatatgcggcgtaatatacgcgccaaagaaaagcgttaagggatgatgcaccagatagataaacagcgaagcattcacgaaataggtgacacgcgcggactgaaagtttaacaagcgatgccccagtgaaaataccacgttcaccatccatagccccattaccatcgtaatcacggattcggtttcgtacatccaggcgtcgccgctcccataacgttgattcagcagatacgcgataaaagcaacggcagcgcctaaagtgcatccgcgtgagggcgtggtgaagcgcgctttcagatcggggtgaatgaaggccaacgcgccgagaataaaaaacggcacataaaatagcgtttgcatcacaataaaattgaacatgccgtcactgaggattgccggatatacgatgaatataatgcgcctgatagcagcgtaagccacccccagcaggaaaaaaataagcgaaagtttggccagcgaaatagcggcgggacgaggcttgcttgtttcctgccttttttggaaccaggtaaaaatcccgatgctgacggtggttaatatcaccagcaccagtaaaaaccacagatgtgaaatgagttcccacgctaacgtattatatttttcataggcagagagtgtaggccagttctctgttttctctttgacatattgcaacaggataaattgcggcaaggtaagcaaagggattgcggtaagcatgggaatacccacacgttctacccgtactttccaccagtgttttaatggataacgtaaaaataacatgtacgaaaaataaccagaaataacaaaaaacacctgcatacgaaaagcgtggataaaatcgttaaacagggttagccaccacgatggcgcggcgctattgacatgccaactgtgagtggaatagatcaacgagatatgaaagggaatccctaacaacatcagccatgcgcggatagagtcaagaaaatattcacgcggcgcgggtacagagctcatataaggtcacgtattctcagatttttcaccttatccataaggcgaattatagttacattcggtagcaaccctacaccaactccgacaacctgtctccaggataagcacgcaaagtgaaaacaggcgcgggaggtgcttaatccatgagccagcgcgctgaacaaagcctggattcagttgtcgtaatgcctgattatccattaaaatggatcggatcgatataagcacacaaagggggaagtgcttacttattatgaaacataaacgacaaatgatgaaaatgcgttggttgggcgcagctattatgttaacgctctacgcatcatcgagctgggcgttcagcattgatgacgtggcaaaacaagctcaatctttagccgggaaaggctatgaggcgcctaaaagcaacttgccctccgttttccgcgacatgaaatatgcggattatcagcagatccagtttaacagcgataaagcctactggaacaacttaaagaccccttttaagctcgaattttaccatcaggggatgtacttcgatacgccggtcaagattaacgaagtgacggcgacgacggtcaaaagaatcaaatacagcccggattacttcaattttggcaatgttcagcacgataaagacacggtaaaagatttaggcttcgccgggttcaaagtcctgtaccccattaacagtaaagataagaacgacgaaatcgtcagtatgcttggcgccagctatttccgcgttatcggcgcaggccaggtatatggcttatctgcgcgcggcctggcgattgataccgccttaccatctggtgaagagtttccccgctttcgcgagttctggattgagcgtccaaaacccaccgataagcgtttgaccgtctatgcattactcgattctccgcgcgcgaccggcgcttaccgttttgtgatcattcctggccgcgataccgtggtggacgtgcagtcaaaagtctatctgcgcgataaagtgggcaagctgggcgttgcgccattaaccagtatgttcctgtttgggccaaaccagccgtcgccgacgaccaactatcgtccggaactgcatgactcgaacggcttatccattcatgcgggtaatggcgagtggatttggcgtccgctgaacaatccaaaacacctcgctgtgagcagctatgcaatggaaaaccctcagggattcggcctgttgcagcgtggtcgcgagttctcgcgctttgaagatttagacgatcgctacgacctgcgtccaagcgcctggattaccccgaaaggcgactggggcaaaggtaaggttgaactggttgaaattccgaccaatgatgaaaccaacgataacatcgtcgcttactggactccggatcaactgccggaaccgggtaaagagatgaacttcaagtacactctgaccttcagccgcgatgaagataaacttcatgcgccggataatgcctgggtgctgcaaacacgccgctcaacgggcgacgttaaacagtcaaatctgattcgccagcccgacggcactattgcctttgtggtggatttcgttggcgccgacatgaaaaaactgccgccggatacgcccgtcgctgcgcaaaccagcattggcgataacggtgaaatcgttgacagtaatgtacgctataacccagtcactaaaggctggcgtttaatgctgcgcgtgaaagtcaaagacgcgaagaaaaccacggaaatgcgtgccgcattggtgaatgccgatcagacgctaagtgaaacctggagctaccagttaactgccaatgaataaaacaactgagtatattgacgcattgctgctttctgaacgtgagaaagcggcattgccgaaaactgacatccgcgccgtgcatcaggcgctggatgccgagcatcggacttactcgcgagaagacgattcaccgcagggttccgtaaaagcccgccttgaacacgcctggccggattcattggcgaaggggcagttaattaaagatgatgaagggcgcgatcagttgcaggctatgccaaaagcgacgcgctcttcgatgtttcccgatccctggcgaaccaacccggttggccgtttctgggatcgtctgcgtgggcgggatgtaacgccgcgctatgtttctcgtctgacaaaagaagagcaggcgagcgagcaaaaatggcgtaccgtcggcactatacgccgctatattttgttaattttgactctggcgcaaaccgtcgtcgcgacctggtatatgaagaccattctgccttatcagggatgggcgctcatcaatcctatggatatggtggggcaggatatttgggtctcctttatgcagctcctgccctacatgctgcaaaccggtatcctgattttgtttgccgtgctgttctgctgggtgtcagccggattctggacggcgctgatgggcttcctgcaactgcttatcgggcgcgataagtacagcatctccgcgtctacggttggcgatgagcccctcaatccggaacaccggacggcgctgatcatgcctatctgtaatgaagacgttagtcgcgttttcgccggtctgcgcgcgacctgggagtccgttaaagccacaggcaacgccgcgcatttcgacgtctatatccttagcgacagttataacccggatatctgcgtggcggagcaaaaggcgtggatggagcttatcgcggaagtgcagggcgaaggccaaattttttaccgtcgccgccgccgccgtatgaaacgcaaaagcggcaatattgacgatttttgccgccgctggggcaatcagtacagctatatggtggtgctggacgcggactcagtgatgagcggcgagtgtctgagcggcttggtgcgcctgatggaagcgaatccaaacgccgggattatccagtcttcgccgaaagcgtcggggatggatactctgtatgcccgctgccaacagttcgcgacccgcgtctatgggccgctgtttaccgccgggctgcacttctggcagttgggggagtcgcactactgggggcacaatgccattatccgcgtgaagccgtttatcgagcactgcgctctggcgccgctgccgggagaaggttcgttcgccggatcgattctttcccacgactttgtggaggcggcgctaatgcgtcgggcagggtggggcgtctggattgcctacgatctccccggctcctatgaagagctgccgccaaacctgctggatgagcttaaacgcgaccgccgctggtgtcacggcaacctgatgaactttcgtctgttcctggtgaaaggaatgcacccggtgcatcgcgccgtgttcctgacgggggtaatgtcatatctgtccgcgccgttatggtttatgttcctcgcgctttctaccgcgctgcaggtcgttcatgcgttaacagagccgcaatatttccttcagccgcgccagctttttccggtctggccgcagtggcgtccggaactggcaatcgcgctgtttgcatcaacgatggtgctgctgttcctgccgaagctgctcagtattatgctgatctggtgtaaaggcaccaaagagtatggcggtttctggcgcgttacgctgtcgctgttgctggaagtgctgttctccgtattgctggcgccggtgcgtatgctgtttcataccgtgtttgtggtcagcgcgtttctcggctgggaagtggtctggaactcaccgcaacgcgacgatgattctacgccgtggggagaagcctttatgcgtcacggctctcaactgctgctggggctggtctgggcggtgggtatggcgtggctggatttacgctttctgttctggctggcgccgattgtcttttcgctgattctgtcgccatttgtttcggtgatctccagtcgttcaacggtaggattacgcaccaaacgctggaagctgttcctgatcccggaagagtattcgccgcctcaggtgttggtcgataccgataaatatctggagatgaatcgccgccgtattctggacgatggctttatgcatgcggtatttaacccgtcgcttaatgcgctggcgaccgcgatggccactgcgcgtcaccgcgccagtaaggtactggaaatagcccgcgatcgtcatgtggagcaggcgctaaacgaaacgccggagaaactgaaccgcgatcggcgtctggttttgctcagcgatccggtgacgatggcgcgtttacactatcgggtctggaatgcgccagagagatactcttcctgggtaaaccattatcagtctctcgtcctgaatccgcaggcgttgcagggacgaacatcgtcagcgagataaggtcttcaggtctggagtgaggtgaaaaataccggcgtgatgccggtatttttatagtgaaatgaggtatcaggtgcgtatattcgcggtgagcataatggtgattaccctgagcggctgcggcagtattatcagcagaacgatccccggacaaggacacggcaaccagtattaccctggcgtgcagtgggatatgcgtgattccgcatggcgctatatcactatcctcgatctgcccttctcactgatcttcgatacactgctactgccgctcgatattcaccacgggccttatgagtaattaacgctcatcccattcgtctgccgcagtacggccttcctcggtatcaagcgggggttcaagctggaattccccttcatcccattcatgcaaagtattctcttcctgccactcctggcggatctctatctcatcataatcgccgtcaaacacgctctgcgcggcttcaccactcagcatcggcagacattcgccatcttcaccttcatcggcgaaaaattcgacctgccacatgatgtccccatcctgcagtacatatttctgaacgttgaactgctgcacattcgcttcgtcttgttcgaggcctggatggtcagccagaaattcttcccgggctgcatcgatagcttcttccagcgtggcatacatggtcatcagtgtctccctttgatttgatgaggtatttagggaaagaatagctgattctgtaatattgcaagtatgaaagcgcaaaaattattctattgccagtctgcgccgtcgtaagctgttccatgaatagatagcattgaacaacaccacgcctgccgtgacgcagaatacggcgcggaagccatagctcgcggaaattgcggcgcccatgagagggccggtgacgttgccgatatcgcggaaagattggttgtaactgaatatgcgcccggctatctggttggtagagttgtaaaccagcagagtttgaacggctggcagcagcgcgccatccgccgcgccaagcagaaaccgcaatagcgcgagctgccacggcgtttgcacaaaagacattggaatcagcagcagtacggaaataatcagcgcgacgataagaatcttttccgggccaattctgtcgccaagcttgccgagccggggggcgctaagtaatgccgccacgccgggaacggacgctatcatcccgctaatgaacgcaatattactgacatctcccgccagttcgcgcacatagagcgtcaggatgggcgcaatagaccccgtcgccacctgaataatcagcgtggtgacaaacaggcttaataccaggcggggattttttaacgaggcgaccacttcccgaacgtgaagcatctcttttttgctcaccggcaggaaattctcgcgaatgaaaaagaaggtgagcagaaaacagataaacaaaacgctggcggtaataaaaaagaccggacgaaggccgtaatggtcggcgagcagaccgcccgcaagtgggccaagcagagcgccgctgacgccgccagtagagagcgtccctaacgcccagccgcttttgtggcgcggcacctgagtggcgatgagcgcattggcgttgggaataaatccgcccagcaggcctaataacgcgcggaggatcagaaattgccagatattttgcgccatgcccattaacagcatcacaatggccatgccgagagcggaacgcaacagcatgatcttacgccctttacgatccgccagaccgccccaaaaaggggacgcgatagctgaaaagaggaacgtaatactaaagaccagcccggaccacatgttgagcgcgctatggcctgttacgccgagttgctcaacgtagagagggagaaaaggcatgaccaggctgaatgccgcgccggttaaaaaacagcccagccaggtaacggttagattgcgtttccagtttatggggacatcagagggtgacatagcgttccacagtatgatgcgcggtttgcgctatcatcaatttaattatgagcgtactaattataattatgcgccgaccttaccagcctcgcaatgtggggagcttttaaagctaaaagaggggaaaaattgcagcctgacggctgcaatcctgtcaatagcgcgacggtacgccttcagggcgagttttaaagcggcgatgcagccacatatactgctctggcgccatcataatgcactgctcaacaatcttattcatccatgcggcagtcgcttctgcgctctccagcggaggcgaatattccgcaggaagaatgatcagttcgtagcctttcccatcgggtttacggcgaggcacgaaggggataatacaggctttagacatgcgcgcgagcatccaggtaccggaggtcgtggcagcctggtcgacagcgaataatggtacaaaaacgctggcgcgcgggccataatcgtgatccggcgcataccagatcaattcgccgcttttcaatgccttaaccatgcctttcagatctttgcgatccaacattgatttattggagcgtaagcgtccccaggtctgtaaccagtcgagcaacggattatcattcgggcgataaactccgatacccgggttatgcataccaaacatgcgggcgccaaactcaagggtaaggaaatgtattcctaccagaatgaaccccagtccctgcgccttaacttcacggatatgctccagaccgctcgcttccatccagcggttcactcgccgatcgggccagaaccaggccatgccggtttccatcacgcccataccgacggattcaaagtttttgaccaccatggtgtggcgttcctgcgcgctcatttccggaaagcataattcaaggttgcgataggcgatttttgcgcggcgtttcattacgcgtcgcgccaggtggcccaatgcgcaacccaatttatagatgaccgggtaggggagttgcacgaccaaccaaagcgcgcctatacccaaccaggttaaccaatagcgcgggtgcagtaaggccacggagaacttaggcaacttcgtcatttctatcctgtctttcaacgaacaattccccgtattctcgcatctttttgcgttgagcaaaaatatgtagcaggagagtggcgattaaatcgacaattgttgttaattatttagtgtaaagcaggaaatgtagcgcaaaatgtgtggatgtaaattggcgagacttgccttatcatgcctgcccactttattttttgctgattgcaggatacgtacaccatgccagtgttacacaaccgcatctctaatgacgagctgaaagccaaaatgctggcggaaagcgagccgcgtacgacaatttctttttataaatatttcactatcgcctctccgcaacagacgcgggacgcgttgtatcaggtgtttacggcgttggacgtttttggtcgcgtttacctggcgcatgaaggcatcaatgcgcaaatcagcgtgccgcaaagcaagctcgagacgtttcgtcaacagctttatacgttcgaccccgcgctggacggggtgcgtttaaatatcgcgctggaggatgacggaaagtcattttgggtgctgcgtatgaaagttcgcgaccgtatcgttgctgacggtattgacgatccgacttttgacgccagtaatgtcggcgattatctgaaggcggcagatgtgaatgcgatgctggacgatcctgacgcggtctttattgatatgcgcaaccactatgagtatgaagtcggccatttcgaaaatgctctggaaatcccggcggatacgtttcgtgaacagttgccaaaagcggttgaaatgctgcgggaacatgcagataaaaagatagtgatgtactgtaccggcggtattcgttgtgagaaagccagcgcctggatgaaacacaacggtttcaataaagtctggcatattgagggtggcatcattgagtacgcccgtcgcgcgcgcgcgcaggggcttcccgttcgctttatcggcaaaaactttgtatttgatgagcgaatgggcgaacgaatctcggatgaggttatcgcgcattgccatcagtgcggcgcgtcctgcgatagccataccaactgcaaaaatgacggttgccatctgctgtttatccagtgtccgcagtgcgccagtaaatttaacggctgctgtagtgaacaatgctgtgaagagttggccttgccggaggaagaacagcgccgacgtcgcgcgggtcgcgagaacggcaacaaaatttttaataaatcgcgtggtcggcttaatagcaaactgagcattcccgatccggctgagtaatattttgccggatagcggcgtaaaggccgctatccggcatttcgccaggcgttacttctgctgaacgccttctactgagatgataagctcaacctcttgtgaggccgggccgagatcggtagttatattgaaatccttcagcttaatttttccttcggcctcaaagcccgcgcgcttaccgccccacggatcgtcgccctggcccatcagcttcgcttccagcgtcaccggtttagtcacgccattgagcgtcagattgccggtaatatccagttcatcgccctcttttttcacgctggtagaggtgaaggttgcctgcgggaatttcgcaacattaagaaattccgcgctacgcaggtgtttgtcacgttcggcatggttagtgtcgacgctattggtgttaatggtcacgttcactttgtctgccgacggatttttttcgtcaaaagtgaacgtgccgtcgaaatctttaaaggtgccgtatagccagctgtagcccagatgctgaatgcggaaattgacgaacgcatgttggccttctttatcaattttatactccgccgccacggcggaaccggtcgtgaataacaaggatgcgagggtgaatcccagcaggttttttttcatttttgagctccatagtcagatgacgacattcctgtcatacgtttcagagtgtcgtctttatcgatgaaatggtgttttagcgccataaccccatgcgagagcgagataatgaccagcgaccaggcaaaccacagatgcagtgttccggcgatgtcagcctgcgcgcccgcgtccgtaagcgtggccggaatctcaaaccagccaaagacgctaatcggtttaccgtcggcggtggaaatcaggtagccgctaatgattatcgcaaagagcaggagataaaggaggagatgacctgcggcggcgccaatgcgcgttaaacgggaatagctggtcaacgcaacgggcggcggcgaataaagccgccagataatacgcacgatcagcgccatcatcagtaatatgccaatacttttatgtatttccggcgcctggtgataccagccgtcgtaataactgagcgtgaccatccataagcccaacgcaaacatgccatagaccaccagggcggtcagccagtggagcgcggcggaaaccacgccataacgctgtggagtatttttaaattgcataaacacaccaatgaatatttcacgagagaatgaaaatggcgtggaaaagcgccgaatgcaacttataaataagaatttgaatgatatttatttttatttcaataattttgatgttgtttgcggttcagcttcagaagtttcgagatatttccccctgataaccgcgcaacggcaagaactggcattattgccgtgcttcaacgttatgaaataaaaagtgaggaattttcaggaagtgtcagttaacgtcaatgaaaagcaatcagaagaaaaggagataaacaatatccatcaccgccagcagcgaccaaagaataacgtaaagcatgaaatgttcgcgaatattattcatcagaaaatgaaagagacgacgcatagcttaccttaataaacagcccctttacggggccgacaaattattggctaaaacgggaaagccggaacggcgtcagatcaaaggagggcgtttttcccaacgcaaaatccgcagcgatttctcctaacaccggggcgaatttaaaaccatgtccgctgagtccagtgatgacaagcgtgttctcatggccaggcagcgtatcgataataaaatcctcgtccggcgaattatcataggtacatgccgccccatgtaaacaaccgccgatacccggcagtacgttacgcaggaaaggaaatgcttccgcgccatcgctggcaacggcggcaaagggcttgcgctcttccggagcttgtattagctgtccgccattgtgtttgccgatttttaactcgtcgttctccgccgggaagccgtaatattgatcgccgttgggcatttcgccggtaaaggccggaaagcggtttttagtgctgtaacgcccatccgccttaaaccaggcaaaaactttacgtacgggctgaacgggcagctccggtaccagcgctttgacccaggtgcccgcgctaatcagcgccttgctggcgtggtagcagccttcactcgtctctatcgtcacaccgttatcatcatggtgaatatggcttaccgggctgttaaatagctgtgcgcagcctgcctctcgggccagacgaagccatgtggtaatggctaattcgctgcgcaggaaaccggagtcagcttcaaacagcccgatataattatcgggcacgcgaatttccggccagcgcgtcatgagggccgtcgcgtccaggcgctcgacgttcaattgccactgttgcgcgcttcgtgcgacgttggctaagaaagcggaatcggccgggccgaggttgacgacgccggagcggacaaaaataggctcttcattgtgtgtggagagttcatcccaaagcgtctgggcgcgaagcaccagcgggacatatttttcgccttcaccataagcgtggcggataagacgggtatcgccgtggtggctgccctgttgatgaggcggcatatgcgcatcggtcatcaggacctttagcccggcgcgggtggcgtaataaccagcggcggcgccaaccgaaccgctgccgataataataaggtcgtatttcatcagcttctctctgctatcgcgatgatttcagggtaaataactgcgctgagatatacaagccagaaataagtgaggcaccttacggtgcctgagagagggggagcgcgtcacgctaatggcgacgatactcgttttcctggtaatcgcctgattctattttggcgatgccggcttctaatattgaaataaattgcctggctacatctgttgttaaccagagcgtttgaccaacttcagtcccttccggttccggacgatttggggtctggtagtgtaaacgcagcatcagcgcatcatagctatcgacggtgctgatgtcccatcctacaagcggatgggtctgaatgacttcattattcttttccatcatgcccccctggtacgtgttataagacaacggttctcgaggttcaatgcgtgtttttcttctgaagcaacttcagtataccaattaataaggctattcactgcgtttttaaagagaccggaggataaatttctctttttaagaattatatgaacaataaagcggcagttcattcatatttttttaggatgttgtgcaattattttgagggtcaggtgaaatattcatcagttgcgcaaataaaaaagccggggcgacccggcaaacatacatcactgcatatcattttttattcattgatgaaccagtcatcagcgctctcccaggtctcctggagaatctcgctaatgcgttctttgtcctcttttgatgcgccaatgacggacaagttgttggcggtagcgtaacgcacggtgacgttacccaaattctccggaaaatgatggctaatacggcgggagagttcgcccgccagcgcatcaatcgcaccggcaggcagaggtgacgttttggctatagtgacttcaatacgcataatggccccctgttgaatatactggatatatatacagttaaatccagtatatagcaacaggtaagcgcattttttatttttttactgaccagcgtactgtttcacccgctaaaaaaggcaccagagaatcatcagccagcgcgatatttcccggtatctgttgttcatcgcgaaccagttccacccaccccgtattcatcggcaggccatagaattgcgggccattcagtgaacagaacgcttcaaagtgcgccagcgcgttcatttcctcaaacacggcggcataactgccaagggcggagggggcgttgaaacaaccggcgcagccgcaactggtttctttacgatgacgtgaatgcggcgctgaatccgtccccaggaaggcgcgcgtaaaaccactggcaaccagttcgcgtaacgcctgctggtgaatattgcgtttcagaatcggcagacagtacaggtgaggacgaatgccgccgaccagcatatcattacggttaaacattaaatgttgaggcgtaatggtagccgccaggtagtcgttgccgtcacgtacatactgcgcggcatctttggtcgtgatgtgctcaaagaccactttaagcgcggtcagacgctggcgtagcggttccattacggtgtcgataaaacgcgcttcacgatcgaatatatcaacatccgcatgggtcacctccccgtggaccagcaatggtattccgagtttttccatccgctccagtaccggcatgatagcgtcgactgacgttacgccatgactggagttagtggtggcattggccgggtaaagcttagccgcagtaaatacgccttcatggaaaccacgctccagttcatcggcatcgagcgaatccgttaaatagcaggtcattaacggcgtgaaatcatgcccggcgggcaccgcatcgagaatacgctggcggtaggcgatcgctgcatcaacggtcgtgatgggggacgccaggttcggcatcacgatagcgcgaccataaatttcgctggtatagggtacgaccgtttttaacatgtcgccatcgcgaaggtgaacgtgccagtcgtccgggcggcggatctttaaaacctgggatggtgcagtcattaataagctccggctgaggaatagtctttttgccggaaacaaaggataagcggaaacgttttcgtttgcacgtaaaaaaaagggcgcgagcgcgccctccgaaatcaattggtgaaaggaataacgatttcaccaggtttaacttcaatgcctttcgcgagtttctttgctaacgcttcgcctttactgctgtcctcacgcaacacgtaagcgggccgctggttaaagtagctacgtaaagactgatttaaataaggcaggagcgtttgtagcaccgattgcattttctccggcgtcacggtggcgtctactacttccatctcctgaagatagatggcgcctttttctttatcaaagaccggcagggcttttagcttgagtttcatcgtcgctttttgactgccaaacagggaattcatatccagcctggcatcgccagtaagggtgactttattaggttcttcccgaccaatctggctgacaaggttagtcaatacgatatgcgcgtcggcaatgccgggcagaccaatatcttttgagaaattattccgtttttcaagcgcttgattgatttcttgttcgctaatggtgtattgcgtaagttgattacaacccactaacaggccgctaactaccagcgcagcggcaaaaaaaaactttttcatggcgttccttagcatgttgcctgtaccctaatcttgacacaaagcagcatgtcgcgccagcggacatggtgccactagaaaaagctgaaaaaggcggcaagaaagggttgccgcctggcgggagttagatagccattgaggagagtaaattaatttgcgtctgctttgccatattatcgcgatagtccgcgacttttgtcggccagtggataccggcgaccagcgtcagattacgcagaagcggaaacagatgaatatcatcttccgataattcgccgttaacggcgttaggctgtacgatgagtttatccagcaaacgtaaatcatcgccgatctttttaatcagtcctgcagagtgcgcaagatggttgtcaaaactgccagatgaggcttcttttttgcggataaaatactgacgcgccgcaggggtagaaaattcatcgaaagcggattttgcaaatcgcggcagcagtagctgattaacgtaaccgttaactttgcgcaaccactcttcaatggctggattgcgtttcccggttaacagcggtttgccgtcgaggttgtcgacataatgtacaatatccatactttcaggaaggtagcgactatcatctttttgcaggatgggcaccatcttttgaccaatcatccgggtgggcgtcgcctcgtcgtcattttgtaacacgttaagttcaacggggatgttcttcaggccgaaaatcatgcgggctttaacgcagaaagggcaatgatcgtaaatataaagcttcacgtttctcctccatttgactgtcggtatctgaccagtatggaggagatagcgacaggtatcaaatcaggcgccgggttccagcatccggcgcggcgtgcgtttatgactaaattgccagcctaaagccaaaaaggtgataaagccgataataccgagcatcatccacggtagttcaggctgcgcaagcgctttccccatatcaaacaaccagccgccgccgatataaccaatcgcgccgccaatggctaatcccagacggctaaagcccatatagcttccccgcgccctcgcgtctgcgagcgacgcgctgagcgtttcgcgcgccggttcggcgataaccgagccgatgtagaaagcgcaaataagcgtaaaaagctgctgtaaattgcccaccatcccgatggggagcatgctcagcgacatgacgagcaaaccggccatcagccgatgctccagccgaaaacgcttttcgctccagcgggcaatcgggtagagcaacgtcagcgagagacacgcctcaatagcgtacatccatttcacggcagcaggcgaaccggcgatatcgtttaccataatcggcagcattaacatgacctgtaccgccagcatatagtagcccgccagcgtcagcacgtaggttacaaaccttttatcgctcatgacgcggcgcattccttcacgcaccggcgttctgaccgttgatagcttccaggccggaagcagccatgcgttgaaaagggcgcataatatgaacaaaatagcgcccgtcgcgcagaccaggcgaaaatcgtattgtagcaaccagcttcccagcagcgcgccaatcaccgcacccgcgctgtcctgcatcatcaacagagagaagaagcggccccgttgctccggacgaattaatttgaccaccagcgctgaacgcggcgggtcgaaaagcgtaccgccgagaccggaaagaaagcaggaaaaccacaagagccagggctcatgcgcgatacccatggtggcaaagcctgcggcgcgcatcagcataccggtgacaatcatcggtttcgcgccaaagcgatcggcgatggcgccgccaaaaatgcccagaccttgttgaataaactggcgcaggccgagcgcgatccctaccattacggcagcccaccccatttgatcgacaaagcgaatagagatgagcgggaagacgacgaaaaaacccagcaccaccaacatgttatcgatgagaagaaaatatttacccaggttcctcgcctgcgagacgcgcgacatttcccctcccgggaaataaaagatgagcgtcttctattctgcggcggcgtttcgttttttcctaccgttagcgggacaatatttttttatcaaaagtcctttttaatcgagagttttcatcaaaatgtggcagcaattcaaaaaatgacgatttgcgcttttcacagagcctggttgcgcaggtatagtaatgttactggcgtgctgaagacgttacaggaaggagtaggtatagaatgtttggctatcgtagtaacgtgccaaaagtgcgcttaaccaccgatcgtctggtggtacgtttagtgcatgagcgtgatgcctggcgtctggccgattattacgcggaaaatcgtcattttttaaaaccctgggaaccggtccgtgatgaaagtcattgttatccttcaggatggcaggcgcgtctgggaatgatcggtgaatttcacaaacagggctccgccttctatttcgcgctacttgatccggaagaaaaagaaattatcggcgtggcgaatttttccaatgtggtgcgcggttcttttcatgcctgttatctgggctattccattgcgcagaagtggcaggggcaagggctgatgtttgaagccttaaccgctgcgattcgctatatgcagcgcactcagcatatccaccgtatcatggcgaactatatgccgcacaacaaacgtagcggcgcgttgctggcgcggcttggctttgaaaaagaaggctatgcgaaagattacctgttgattgatggacaatggcgcgaccatgtcctgacggcgttaaccacgccgttatggacgccggggcgttgagcggcttacggaatgagaggcaaagggagaaaacgatgaaatatgaattaaccgccactgaagcgcgagtgattggctgtctgctggaaaagcaggtgacaacgccggaacagtatccgctttccgtcaacggcgtggtgacagcctgtaatcagaaaaccaaccgtgaaccggtgatgaacctgacggaacaagaggtacaagaacagctcgataacctggtgaaacgccactttttgcgtacggtcagcgggtttggcaaccgcgtcaccaaatatgaacagcgtttctgtaattccgaatttggcgatctgaaacttagcgcggcggaagtggcgctcgtcactacgctgctgctgcgtggcgcgcaaacgcccggcgagttgcgtagccgggcgtcgcggatgcatgaattcagcgatatggcggaagttgaatccacgctggaacggcttgccagtcgtgaggacggcccgtatgtcgtccgtctggcgcgtgaaccgggtaagcgcgaaagccgctatatgcaccttttttgcggcgacgtcgatgaactgtctctccagacgtctgcgccggaaagtgcgtcgggcgatcttcagtcgcgcgtcgaagcgctggaaagcgaagtggcggagttaaagcagcggctggattctttgttagctcacctgggagagtaatgtgagaacattacggattggcattgtcgggttaggcggtattgcgcagaaggcctggctgccggtattaaccaacaccgccggatggacgttacagggcgcctggtctccttcgcgggataaagccttacgtatttgcgaaagctggcgcataccgtatgtggattcgctggcgaatttagcgtccggctgcgatgcggtctttgtccactccagtaccgcaagccattatgccgtggtcagcgaacttctcaatgccggcgtccatgtctgcgtggataaaccgctggcggaaaatctacgtgatgccgaacggctggtggcgctggcggcgcaaaaaaaattgacgctgatggttggctttaatcgccgtttcgcgccgctgtaccgcgaactgaagacgcgcctcggcactgcggcgtcactacgtatggataaacatcgtaccgatagcgtcgggccgcacgacttacgttttactttgctcgatgactatctgcatgtcgtggataccgctctgtggctggcgggcggcgaggcgcgccttgccagcggcacgttgctcaccagcgagtccggcgaaatgtgctatgcggaacatcatttttccgccgacaaactacaaattaccaccagtatgcaccggcgcgccggaagtcagcgtgaatcggtccaggccgtcaccgacggcgggctatatgacgtgacggatatgcgtgaatggcgcgaagagcgcgggcagggtattctcatcaaacccattcctagttggcaaacgacgcttgaacagcgtggttttgtcggatgcgcgcggcatttcattgactgcgtacaaaatcagacggttccggaaacggcgggggagcaggcgattttggcccagcgcgtcgtggaggcgctgtggcgggacgccatcagcgaataaccctctgtaacatctggcggtagtaattcatcgtaatccaggtactataccctcaataattcgagttgcagaaaagctaacgcacatgcagctcgaagtatggcgggtatatatgcccactctacacaatacctcttttcacagtgaataatggcaaaccgtggggagtctgtaaggcctgataagacgttttaacgtcgccgtcaggcgcggtgatacagccggatacggcagaagttgcgttatccggtcgatggatcagccatgcaggagttttacgccagggtctggaatacaaaagaaatgaatttattgaaatcgctggctgccgtcagctcgatgactatgttttcacgcgtgttgggctttgcccgtgatgcgattgtcgccagaatttttggcgcagggatggcgaccgacgccttttttgtggcgtttaaactccctaatttactacgccggatctttgccgaaggcgctttttctcaggcctttgtgcctatcctggcggaatataagagcaagcagggtgaagaagcgacgcggatctttgtcgcttacgtttccggcctgttgacgctggcattggccgtcgtgacggtggccggtatgctggccgccccgtgggtgattatggtaaccgcgccgggttttgccgatactgcggataaattcgcgctgacgacgcaactgctgcggattacatttccctatattctgctgatctcgctggcttcactggttggcgccattctcaacacctggaatcgcttctctattcccgcttttgcgccgacatttcttaatatcagcatgatcggttttgcattattcgccgcgccatactttaatccgccggtgctggcgttagcctgggcagtcaccgttggcggcgtgctgcaactggtgtatcaacttccgtatttgaaaaagatcggtatgctggtgctgccgcgcattaactttcgcgacaccggggcgatgcgggtggtcaaacagatggggccggcgattttgggcgtttccgtcagtcagatctcccttatcatcaataccattttcgcctcgtttctggcctccggctcggtctcatggatgtactatgccgatcggttgatggagttcccgtccggcgtgctgggcgtggcgttggggaccatcttgttgccgtcattgtcgaaaagctttgccagcggcaatcatgatgagtactgccgcctgatggactgggggctgcgtttgtgctttttactggcgttgccgagcgcggtagcgttaggcattctggcgaagccgctgacggtctcgctgtttcagtacggtaaattcaccgcctttgatgcggcgatgacgcagcgggcgttaatcgcctattcggtggggctgattggcttgatcgtcgtaaaagtgctggctccgggcttctattctcgccaggatattaaaacgccggtgaaaatcgccatagtgacgttaatcatgacgcagttaatgaacctggcgtttattggaccgctgaaacacgccgggctgtcgctctctattggtttggcggcatgtctcaatgcgtcgctgctgtactggcaactgcgcaaacagaatatctttacgccacaaccgggctggatgtggttcctgatgcgtctgatcatttccgtactggtgatggccgccgtattgttcggcgtgttgcatattatgccggagtggtcgcaagggtcgatgctatggcgtttgctgcgtttgatggcggtagtgatcgcgggtatcgcggcctatttcgccgcgcttgccgtgctgggctttaaagtgaaagagtttgttcgccggacggcgtaaattcagtgcctgatagcgctgtgctatcaggcctacaaggcattcaggccggaaaggcgcaacgtcgccatccggcaatgattagatagaaatttttttaccgccgcggtgagagacggaagtctgaccgtcagccccgtacaaggtcggctcctggtgaggtttcagcacctccagcgcctgttgattacgctcgatttgcccttccagcagccagccgttgtgctggttgaggtcgcgaagatgctgcgttttttcggtaatcgcctgccagcgctctgcaatgtcatcgtttgcgctacgctgcgcattctgctccagacggcgctgttgttccagataatccagcgtcgccagcaacgagcttttttcttctgtaatacgctgtagctggctgccgttaatctggcctacggaaagctgttgttgctcggcgtccatcaccgtcttcaggtcattcaggacggtggtcatctggtcaagtatttctgacaaacgagtcatacgcttatttactctgtaagtagctctgcgcctcgcgaatgagcgagtctgctatttttcccgtatccatttttaactcaccgttacggatagccgtttttaatgcttcgacgcgttccatattaatgtcgctgacgcctggctgcatgagcttcgcttgcgcgtcgcttaacgttacgctggcgctcgtcgcggcggacgttttttcctgacgcgttttttgtaccggcgtgtcgctggtttcgcgcgtctggacagtgctaacgggtttcaaaggtgaggtacggtcaatgctcatttatttatcctcatcgagggttacgttgtagcggccagctaccatcatggttgaatatctcatcggcagccgcgacaaaatctttacacaattataggttaataagaatattcccatcagaatcgacggttccactcacgatttgacccgatgtcatgcgcacgcgcgcattttgcgcgacggcagcattattcatcgcctgaccttccgcattgacgctgaacccctcgccattggcgatgacctgtactcgttgccccgctttgacgcgccaggcctgacgtatcatcgtaagctgtaccggctgcccgggagcgagatcgcgcaaactgacggcatcctgaatctgacggatatccagtaccgtccgcggcggtaactgatccagcctgccacgttttagcgtgacgttggccggcgtcaattttccgccgcgcgcgatgggcgcggcaacggcgacataattgccggtcgcttgcacattcacctgcaaataacgtttttcattggcgcagcgcgccaccacattgacgttgccccacagcttcgcgctgcccgtcatgctgaaggctggctgttcgcagctcggtagcagattgggcgatgaacggagcgtgacaaccacctcgtcgctgaagccagccagacgctgggaaaaccacgtggtcagctgggcgttgatgtcctgcgccattgtcagggggctgaacagcaaagccgccacggcgaatcctcgttttaacgtttgcatggtacttccccctggttgatgtcatgacaggattctacccgtgtgaagcaagcatcaacgcaataaatagcgacgcattttgcgtttattccggcgataacgcgcgcgtgaaggcatttaagctgtcggctgaattttgccatttgcggaggagatatgctcgacaggctcgatgccgccttacgatttcagcaggaagcgctaaatctgcgcgcgcaacgtcaggaaatattagcggcgaatatcgccaatgccgatacgccggggtatcaggcgcgcgatattgattttgccagtgagttaaaaaaggtgatggtgcgtggacgggaagaaaccggcggcgtcgcgttaacgttgacttcctctcaccatattcccgcccaggcggtctcttctcccgcagtggatctgctttatcgcgtacccgatcagccttctttggatggtaataccgtagatatggacagggaacgtacgcagtttgcggataacagtctcaaatatcagatggggcttaccgttctgggtagccaactcaaaggcatgatgaatgtgctacagggaggaaactaattcgtggcgctgttaaacatttttgatattgccggatcggcgcttgccgcacagtccaaacggttgaacgttgcggccagtaacctggcgaatgcggatagcgtcaccggcccggacggacagccttatcgcgccaaacaggtggtttttcaggtggacgccgcgccgggtcaagccactggcggggtaaaggtcgccagcgtgattgaaagtcaggcaccggaaaagctggtttatgagccaggcaatccgctggcggacgctaatggttacgtcaaaatgcccaacgtcgatgtggtcggcgaaatggtcaacacgatgtcagcctcgcgcagctatcaggcaaatatcgaagtcctgaataccgtaaaaagcatgatgcttaaaacgctgacattaggccagtaaaggaggcgcgtatgtctattgccgtaaatatgaatgacccgaccaacacgggcgtcaaaacgacgaccggcagcggatcgatgaccggaagcaacgctgccgatctgcaaagcagtttcctgaccttactggtcgcgcaattgaagaaccaggacccgactaacccattacaaaataatgagttaacgacacagttggcgcaaatcagtaccgtgagcggcattgaaaaactgaatacgacgctgggggctatttccgggcaaatcgataatagtcagtccctacaggcgaccacgctgattggacatggcgttatggtgcctggcaccacaattctggcgggtaaaggcgcggaagaaggggccgtgacgtccacgacgccgtttggcgtggaattgcaacagcctgcggacaaagtgacggcaaccattaccgataaagatggccgggtggtacggacgctggagatcggtgagttgcgagccggggtacacacctttacctgggatggtaagcaaacggacggaacaacggtaccgaatggttcttacaacattgcgattaccgccagcaatggcgggacgcaactggtggcgcagccgctgcaattcgctctggtacagggcgtgacgaagggcagtaacggcaacctgttggatctgggtacctacggcaccaccacactcgacgaagttcggcaaataatctaagcccttacacttatcaggagtcagtcatgtctttttctcaagcggttagcggcctgaacgctgcggccaccaaccttgatgttatcggtaataacatcgccaactccgccacctatggctttaagtccggtacggcatcatttgccgatatgttcgccggttccaaagtggggctgggcgtaaaagtggcggggattacccaggattttaccgacggtacgacaacgaacaccgggcgcgggctggatgtcgcgattagccagaacggttttttccgcctggtagacagcaacggttccgtgttctatagccgcaacggccagttcaaactggacgagaaccgtaacctggtcaatatgcaggggatgcagttgaccggctatccggccaccggtacgccgccgaccattcagcagggggcgaatcctgcgccgatcaccattccgaacacgctgatggcggcgaaatcgaccaccaccgcgtcaatgcagatcaacctgaactcaacggaccctgtaccgtctaaaacgccctttagcgtgagtgatgcggattcgtataacaaaaaaggcaccgtcaccgtttatgacagccagggtaatgcccatgacatgaacgtctattttgtgaaaaccaaagataatgaatgggccgtgtacacccatgacagcagcgatcctgcagccactgcgccaacaacggcgtccactacgctgaaattcaatgaaaacgggattctggagtctggcggtacggtgaacatcaccaccggtacgattaatggcgcgacagcggccaccttctccctcagcttccttaactccatgcagcagaacaccggggctaataacatcgtcgccaccaatcaaaacggctataagccgggcgacctggtgagctaccagattaacaacgacggcaccgtggttggcaactactccaacgagcaggagcaggtgctggggcagattgtgctggctaacttcgccaacaacgaaggtctggcatcccagggcgataacgtctgggcggcgacgcaggcttccggggttgcgctgctggggactgccggttccggcaacttcggtaagctgacgaacggcgcgctggaagcctctaacgtggatttgagtaaagagctggtgaatatgatcgtcgcgcagcgtaactaccagtcgaatgcgcagaccatcaaaacccaggaccagatcctcaatacgctggttaacctgcgctaagcgcctgacgggatagcttaatggatcacgcaatttataccgccatgggggcggccagccagacgcttaaccagcaggcggtaacggccagcaacctggctaatgcctcaacgccgggctttcgcgcgcagcttaacgcgctacgcgcggtgcccgttgatggcctctctttagcaacgcgcacgctggttacggcgtcgacgccgggggcggatatgaccccgggtcagttggactacacctcccgtccgctggatgtcgcgttacagcaggacggctggctggtagtgcaagcggcggatggcgctgaaggatatacccgtaacgggaatatccaggtgggtccgaccgggcagttaaccattcagggacatccggttatcggcgaaggcggcccgattaccgttcctgaagggtcggaaatcaccattgcggcagacggcacgatctccgcgctcaatcccggcgacccgccaaacacggtggcgcccgttgggcgactgaagctggtcaaagcggaaggcaatgaggtgcagcggagcgatgacggtttattccgccttaccgccgaggcacaggctgaacgcggggcggtactggccgccgacccgtcaattcgcattatgtcgggcgtgctggagggcagtaacgtcaagccggttgaagccatgaccgacatgatcgccaacgcacgtcgttttgaaatgcagatgaaggttatcaccagcgtagatgagaacgaagggcgagctaaccaactgctgtcgatgagttaatacaggacattttatgatcagttcattatggatcgccaaaaccggtctggacgcgcagcaaaccaatatggatgtgattgccaataacctggcaaacgtcagcaccaatggttttaagcgtcagcgcgcggtatttgaagatctgttgtatcagaccatccgccagccgggcgcgcagtcgtccgagcagacgacgctgccttcagggctgcaaatcggtaccggcgtgcgtccggtcgccacggagcgtctgcacagtcaggggaacctgtcgcagaccaacaacagtaaagatgtggcgattaaagggcagggctttttccaggtcatgctgccggacggtacgtctgcttatacccgcgacggctctttccaggtggatcagaatggtcaactggtgacggcgggcggttttcaggtgcagccggcaatcaccattccggccaacgcgttaagcatcacgattggccgcgacggcgtggtcagcgttacccagcaggggcaggccgcgccggttcaggtcgggcagcttaacctgaccacctttatgaacgacaccgggctggaaagcattggcgagaacctctatatcgaaacgcaatcgtccggcgcgccgaacgaaagcacgccggggctcaacggcgcggggttgttgtatcaagggtatgtcgaaacgtcgaacgttaacgtggcggaagagctggtgaacatgattcaggttcaacgcgcctatgaaattaacagtaaagcagtatcgacgaccgatcagatgctgcagaaactgacgcaactctaaggggccgccggtgggggatacgccaccggctccctgattttgaagatgaaggtaatgcaaaaatacgcgcttcacgcttacccagttatggccctgatggtcgcgacgctgacaggatgcgcctggatacccgctaaaccgcttgtgcagggggcgaccacggcgcagccgatacctggcccggtaccggtggcgaatggctccatatttcagtctgcgcagccgattaattatggctatcagccgctttttgaagatcgtcgaccgcgtaatatcggcgatacgctcacgattgtgttacaggaaaacgtcagcgccagtaaaagctcgtcggcaaatgccagccgcgacggcaaaaccagttttggttttgatacggtaccgcgttatctgcagggattattcggtaattcccgcgcggatatggaggcctccggcggcaactcttttaacggcaaaggcggcgcgaatgccagcaatacctttagcggcacgctgaccgtgaccgtcgatcaggttctggccaatggcaatttacacgtcgtgggggaaaaacagatcgcgattaatcagggaacggaattcatccgcttctccggcgtggtaaatccacgcaccatcagcggcagcaactctgttccctcgacacaggtggcggatgcgcggattgaatatgtcgggaacggctatattaacgaagcgcaaaatatgggctggctgcaacgtttcttccttaatttgtcgccgatgtaagcgaggtgtatgtgtttaaagctcttgcaggaatcgttctggcactggttgccactctggcgcacgccgagcgtatccgggatctgaccagtgtccagggagtacgggaaaactcgctgatcggctacgggctggtggtcgggttggacggtacgggcgaccagacgacccagacgccatttaccactcagacgctgaataacatgctgtcacaactggggattacggtccccaccggcaccaatatgcagttgaaaaacgtggcggcggtgatggtgacggcgtcgtatccgccttttgcgcgacagggacaaacgatcgatgtcgttgtttcctcaatggggaacgctaaaagtctgcgtggcgggacgttattaatgacgccgttaaaaggggtggacagccaggtgtatgctttggcgcagggcaatattctggtcggtggcgcgggcgcttccgcaggcggcagtagcgtgcaggttaaccagcttaatggcgggcgcatcactaacggcgcgattatcgaacgcgagttgccgactcagttcggcgctggcaacaccattaatctgcaattgaacgacgaagattttacgatggcgcagcaaattaccgacgccatcaaccgcgcgcgcggttacggcagcgccactgcgcttgatgcgcgaacggtacaggtacgcgtgcccagcggcaacagctcgcaggtgcgttttctggcggacattcaaaatatggaagtcaacgtgacgccgcaggatgcaaaagtcgtgatcaactcgcgtaccggttcggtggtcatgaatcgggaagtcacgctggatagctgcgctgtggcgcagggcaatttgtcagtgacagtcaatcgccagctcaacgtcaaccagccgaatacgccatttggcggcgggcagaccgtggtgacgccacagactcagatagatttgcgtcagagcggcggatcgctacagagcgtgcgttccagcgccaatctgaacagcgtagtgcgtgcgctgaatgcgcttggcgcgacgccgatggatctgatgtcgattttgcagtccatgcagagcgcgggctgtctacgcgccaaactggaaatcatctgatgatcggagacggtaaattgctggccagcgcggcctgggatgcgcaatctctgaacgaactgaaagcgaaagcgggccaggacccggcggcgaatatccgtcctgtggcccgtcaggtggaagggatgtttgtgcagatgatgctgaaaagtatgcgcgaggctttacccaaagatggtttattcagcagcgatcagacgcgtctgtataccagcatgtatgaccagcagatcgcccagcagatgaccgccggtaagggattggggctggcggatatgatggttaaacagatgaccagcgggcagacgatgcctgcggatgacgcgccgcaagtaccgcttaaattctccctggagacggtaaacagctatcaaaatcaggcgctgacccaactggtgcgcaaagccataccgaaaacgccggacagcagcgatgcgccgctctccggcgacagtaaagactttctggcccggctttcgctccctgcgaggctggccagcgaacaaagcggggtgccgcatcatctgattctggcgcaggcggcactggagtccggctgggggcagcggcaaatcctgcgggagaatggcgaacccagctataacgtatttggcgtgaaagcgaccgccagttggaaagggccggtgacggagatcaccaccactgaatacgaaaatggcgaagcgaaaaaagtgaaagcgaaattccgcgtctatagctcgtatctggaggcattatcggattatgtcgcgctgttaacgcgtaacccacgctacgctgccgtgaccactgccgccacggcagagcagggcgcagtggctctgcaaaacgccggatacgccactgacccgaattacgcgcgtaaattgaccagcatgattcagcagttgaaagcgatgagtgaaaaggtcagcaaaacctacagcgcgaatctcgacaatctcttttaaattgctcaagtccacgtagtcgctgccgataacaacgagtattgaaggattaaaaggaaccatcatgtccagcttgattaatcacgccatgagcggacttaacgccgcgcaggccgcgttaaatacggtcagtaataacatcaacaattataacgttgcgggttatacccggcagacaactattctggcgcaggcaaacagtacgttaggggctggcggctggataggtaatggcgtttacgtttcaggcgtacagcgcgaatatgatgcgtttatcactaatcagctacgcggcgcgcaaaaccagagcagcggcttaaccacgcgctatgaacaaatgtcgaaaatcgacaacctgctggccgataaatccagctcactgtctggttcgttgcagagtttttttaccagcctgcaaacgttagtcagtaacgcggaagatcctgcggcgcgtcaggcgctgattggtaaagcggaagggctggtaaaccagttcaaaaccaccgatcagtatctgcgcgatcaggataaacaggtcaatatcgcgattggctccagcgtggcgcaaatcaacaattacgcgaagcagatagctaacctgaacgatcaaatctcccgtatgacgggcgtaggcgcgggcgcatcgccgaacgacctgctcgatcagcgtgatcagttggtcagcgagcttaacaagatcgttggcgtcgaggtgagtgtacaggacggcggcacctataacctgacgatggccaatggctatacgctggtgcaggggtcgacggcgcgtcagttggcggcggttccctccagcgccgacccgacgcgaacgactgtcgcttatgtcgatgaggccgccggtaacatcgaaattccggaaaagttgctgaacaccggttcgctcggcgggctactgacgttccgttctcaggatctggatcagactcgtaatacgctgggccagttggcgttggcgtttgccgatgcgtttaacgcgcagcataccaaaggttatgacgccgacggcaataaagggaaagacttctttagcattggctcgccggtggtatatagcaacagtaataatgccgataaaacggtatcgctaaccgctaaggtggtcgacagcacgaaggttcaggcaacggattataagattgtttttgacggtacagactggcaggttactcgcactgcggataacaccaccttcacggcgacaaaagatgctgacggaaaactggagattgacggtctgaaagtgacggtagggaccggcgcacagaaaaatgacagttttcttctcaagccggtcagcaatgctatcgtcgacatgaacgttaaagtgacaaatgaagccgagattgcgatggcgtctgagtcaaaactcgatcctgacgtggataccggcgacagcgataaccgcaatggtcaggcattgctggacttacaaaacagcaatgtagtgggcggcaacaaaacttttaacgatgcttacgccacgttggtcagcgatgtgggtaacaaaacgtcaacgctgaaaaccagcagcaccacgcaggcgaatgtggttaaacagctttataaacagcaacagtcggtttccggcgttaacctcgacgaagagtacggcaatttgcagcgttatcagcagtattatctggcgaatgcgcaagtattgcagaccgcgaatgcgctgtttgatgcgttattgaatattcgctaaaggagaaggatgacatgcgtatcagtacccagatgatgtacgaacaaaatatgagcggcatcactaattctcaggccgaatggatgaagctgggcgagcagatgtctaccggtaagcgcgttaccaacccatctgacgatccgatcgccgcgtcgcaggcggtagtactctctcaggcgcaggcgcagaatagccagtacgccctggcgcgtacgtttgccacccaaaaagtgtcgctggaagaaagcgtactcagtcaggtgacgacggcgattcaaaccgcgcaggaaaaaatcgtctatgccggaaacggcacgttaagcgacgatgaccgcgcgtcgctggcgacggatttacagggcatccgcgatcagctgatgaacctggcaaacagcactgacggcaatggtcgctatatctttgccgggtataaaacggaagcggcgccattcgaccaggcgacaggtggttatcatggcggcgagaaaagtgttacccagcaggtggattccgctcgcacgatggtaattggccatacgggtgcgcaaatttttaatagcatcaccagcaatgcggtgccggaaccggatggctcggactccgaaaagaatctgtttgtcatgctcgatacggcaattgccgcactcaagaccccggtggaaggcaataacgtggaaaaagaaaaagccgctgccgccattgataaaaccaatcgcggcttaaaaaattcgcttaataacgtcctgaccgttcgtgcggaactgggaacgcaactgagcgaactcagtacgctggattcactgggaagcgaccgtgcgctgggacagaagctacagatgagcaacctggtagatgtggactggaactcggtcatctcctcctacgtcatgcaacaggcggcattacaggcgtcctataaaacgtttaccgacatgcagggaatgtcgcttttccagttgaaccggtaacacctctttttgaaacatatcacgaaactggatatgttttgtctgcccgcgccatccaccccggcgcgggcatttttttagtcgtcattgagttagtggtcatattgtcgcgcccgtagcgacgccatccgtacgtattatcccgcccgatctcataaacgcctggagtgactaaaagacgccatggggtgaggcattgccctgtaaggggcataaaaaagccgacctggcggtcggctttgtatcagcatttacatcattctaccggctgtgggcgtgtcgccggggcgctggcgtgacgtgtggcgctgtgtccgcctgccgcgcctttaccttcaaagtggaaggaaggccgctgccagtcgctatggtgcggggtttccggcacatattccggcgctggcgcacgcgtcatcggcgcgctggcgtgattatgatcgtcaacgcagacaacgtcctgcgacttttccaccacctgggccggtgcgataacggtttcttctgccgtgtgctccacaacagccgcttccgcttttgtctcttcttctggctcgacaacgacaacatcagctacgttttcagccaccgtaatggacgcgtcggcggtttctgctaccggttcggcgtcagcaataacctcttgcgccaccggcgtatcgctttcggcaatcagttgcggctgttcatcaactggcgcggcaatcacttccggatgcgttgtctcgacctcgacgacttccggcgcctgtggttcggcgacggtctgcggctcaacggcaacgttttctactgcctgtaccgacgcttgtggttcgagcgctgcggtcgcagcgataacctgctgttcagcgacaaccggttgtggcagcgccagatctgcttcacgctgctcgtcaacaacctgcgtttcctgaggacggacaatcgggtagcggatccagactttaccggacgccatttctggcgacgcgcaggcgacggttaacggcattggcgattgtgtcgggtagcgctcgtcacgatagcgacggcgacgctgaccgcttacgcgcaggtggcgcggagaacggcgggagcgacgcggcataccggtattatcgcgaggttctacgctatcatcctgctctggcgcgatatcggcgacgacaggtaaatcaactttcgccagctcggtacgcggcgctggaacgggctgttcaacgttttcaaccgggcgcggttcgtcgacgacgaccggcgtgtcaaccgtttcaaccactgcgctgttggtaaagcggactttctgattaagctggcgctgcttgcggcgcggctgaacctgctgaacgcgttcttcctgctcggtctcctggacaggttgttcttcgcggttaagcgcttttacttcctgctgcgcctggcgcttgtcatcattgcggcggcggctgcgttcgcgacgcggcgtctgttgctgttcatcgccggttttcactttttccgccgtttcctgctggcgggtatcgcgcgcttccgcattttgctgctgcgtctggcgacggttacgacgattatcgtcgcggctctcgccgccgtcacgtccggcacggttatcacgggtgtcgcggcgttcgttacgatcgcgacggttgttctgccgtggcttgcgacgatcctgctgacgctccgctttttcttccgctttcggcgcggctgtttcgacggttttcgtttcttcaccgctgaacagttgtttcagcgcgttaaggaagcggctaaacagacccggctgggcaggctgcgcggcggcaacattatcctttttcgccgtggcgacgctaaccgccggttcgacaggcgtcggcgccggaggcacatctggcatagcgaatgtcgccagcgcaggctgctccgggcgtttacgctcggcgtactcttcttcagaaggcagcgccatcgcttcttcgtgcagcttcggcagcatgtagctcagggtcggcgtttcttcccctttgcgtacgcgcagcacggaatagtgcggcgtttccatctgatcgttcgggacgatgacacagcggacgccatcctgacgcgtctcaatagcgttcactgccgtccgtttttcgttaagcagataagaggcgatcggcaccggaacaatggcatggacttcctgcgtattctctttcagcgcttcttcttcaatcaggcgcagaatggacagcgacagagattcgttatcgcgcacggtgccggtaccgctacagcgcggacacacgtgatggctggattcgcccagagacgggctcaggcgctgacgcgacatttcgagcaggccgaagcgggaaatatggctaatctgaatacgcgcccggtcctgacgcaccgcttcacgcagacggttttctaccgcgcgctggtgacgtaccggcgtcatatcgataaagtcgataacgatcaggccgcccaggtcgcgcagacgcaactggcgggcaatctcatcggccgcttccaggttggtattaaacgccgtttcttcgatatcgccgccgcgagtcgcgcgggcggagttgatatcgatggcggttaacgcttcggtactgtcaatgacgatggagccgccggagggcaggcgcacttcacgctggaacgctgactcgatctgcgattcgatctggtaatggctgaacaacgggatttcaccggtgtacagcttaattttgctgctaaaatccgggcggcccaacgcggcgatatgctgacgcgccatttccatcacttttggattgtcgatcaggatttcaccgatatcctgacgcagatagtcgcgaaacgcgcgtacgatgacgttgctttcctgatggatcaggaacggcgcgggacggctttcagcggctttctgaatggcctcccagtgtttcaggcggaagcttaaatcccactgcaacgcttcggcggatttacccacgcccgcggtacgcacgataagccccatcccttcaggaagttccaggctggccaacgcttcttttaactcggtacgatcgtcgccttcaatgcgacgggaaataccacccgcgcgcgggttattcggcatcagtaccaggtagctgcccgccagactgataaaggtggttaacgccgcgcctttgttgccgcgctcttctttatcgatttgaacaatgacttcctggccttcgcgtaacacgtctttaatgttcgggcgaccatgagcgctgtagttagcggggaaatattcgcgggcaatttcttttaacgggaggaaaccgtggcgttctgcgccgtaatcaacaaaagccgcttccaggctcggttcaatacgggtaattttgcctttatagatgttcgcttttttctgctcgtgtccggggctttctatatccagatcgtacagacgctgcccatctacaagggcgacgcgcaactcttcctgctgagtcgcgttgattaacattcttttcatcgtaacttactcattattcttacgttgacgactaagctgcgggcatggtgacgccttaccgggcatgaaccgatggcctcgtgactatttcgcgtcgccaacctcacggttatcgtcagctcaaagaggcgcagagtgtcggttgcctgtatttcatacggaaacacagcgcaattatcagggaagcagcctgggcattactctccagagaagatcctatctaccggtaaggactgcaacccgcagcccgctaactgtctgaaaaatcaatacgtcttacgccattgctgcgttgatgatcggtcagacaaaatgggttattccgctaaactttttgttttaacaagtttcggtgcggaaaccgcatcattattccactgctaaccttgttatagcaagatgacttttaccatttatcacccgcttactcacagttttttcaccagcgtgagccaatcgctttaataaccagcaaaaccgcagtgaaaaatgttcatccactggcgtagacgtctctataagcatagaaaaatgtgtggcgcgaatctcacaggctatttagaatcgccccccatgaaaacagaaacgccatccgtaaaaattgttgctatcgccgctgacgaagcggggcaacgcattgataactttttgcgcacccaactgaaaggggtaccaaaaagtatgatttatcgcatcttgcgtaaaggcgaggtgcgggtgaacaaaaaacgcattaaaccggaatacaaactggaagcgggcgatgaagtccgcattccgccggttcgcgttgctgaacgcgaagaagaggccgtgtcgccgcatttgcaaaaagtggcggcgttggcggacgtcattttgtatgaagacgaccatattctggtgctgaataagccttccggcaccgccgtacacggcgggagcgggttaagttttggcgtcatcgaagggctgcgggcgttgcgtccggaagcgcgattcctggaactggtgcatcgtcttgaccgcgatacctccggcgtgctgttggtggcgaaaaaacgctccgcgctgcgttcgctgcatgagcaactgcgcgaaaagggaatgcagaaagattatctggcgctggtgcgcggccagtggcaatcgcacgttaaaaccgtacaggcgccattattaaagaacattctgcaaagtggcgaacgcattgttcgcgtgagccaggaaggcaaaccgtcagaaacgcgcttcaaggtggaagagcgctatgccttcgccacgctggtgcgctgtagcccggtcacgggccgtacgcatcagattcgcgtacatacccaatatgccggtcaccctattgcgttcgacgatcgctacggcgaccgtgagtttgatcaacagcttaccgaagcgggaaccggtcttaaacgtctctttctgcacgccgcggcgctgaagttcacgcatccgggaacgggcgaagtcatgcgcattgaagcgccaatggataacgccctgaagcgctgtctgcaggtgctgcgtaacgcaaaatagttcctctttcgggcaggttatctgcccgaatctcacttttctcataatatttttgttttgctgtatccgacgcatttttaccgttgtgcactgtttattcttgcgatccggatttcggcgcgtttaaggacgaacagatggccaatactagctggatgcgctcatttactcagcgttggggaaaatacgttatcgtgccgctcgtgatcgcgatgctgaccggttgcgaagggaagggcgatagttcacgacgggctttcgttgagtatttgaatacgcaaatcattacgtctcccgtggtgggcgtctgtgagttgacgccagcccaacgtcaggcttttggtcattacgccgatgactacgatgtactattaactgcctacgggcaaatctttgctgtggtgtatgagaccggccaggaggataagatcaccggtgttattcagtctgagcgtgataatctggttttcctgaacgagctacgtgtggctcgtgacgtaaacaatcgatttatccttcggttgaaaaatgtgagtagtgaaaacagaaaaaaatattctgctttaaagctccccgctgatgtgaagcctgtctttgacgctgcgtggaataaaaccgtaacaccgctggatgagacgatgactcgctattattttctgcgcggaaagcggctcgaccaactggtcgcaatgggcgagtttctgcaaaaacagggaaataaagtccgctttgaaacgaatggaaaagcggtttttgccgacctggcagcaaaagaacactttcaggatcaacaatttaattttttcattacgcagaatgatataaaccatcttactcagcagatggttgaatttataaatagtcaacaagatgcggctgatgctggcggcgttaattaaaggaatgtgtcgtgaggtgaagcaatgttcgggggagggcgtaaactcatcgcgagatggaatttaacgagtcgcaaagggaaggtttcaggacagtaaacgtcctgagagttgttcgcgagaataagtttgtaagccgcttttgacgccgtagagcgcgtcaggcgagtattgagaacatgtgtttttacaaaactgaactgagatggggaattcattaacgcgcacgtacaccgctgttgataccctatgggataaaacgcaccgtacatcggttcgtaataccaatgctttttttctggtcggtgaatggattgaccaggaaacgggcccgcacgaagagagtgaagatcggcaggcgctaaattgttcacaacaagcgctttccagttggttagaactggaagcggtcgaaactgctccccaataaacgggagataactaccaacacgtgcagaaacggcttttagcggtatttgaaaagcctacagagtaggccgtttattgctgtagcgggttgaagccctcccgtcgcagcatctggcacagggcaataagcggcaagccgatcagcgtgttcggatcacgaccctccaggcgctcaaataatgcaatgcctaaaccttcgcttttaaaacttcccgcgcagtgcagcggatgctctttacggacatagtcgtctatttccgcttcgcttaaatggcgaaaatgaacgtcaaaaggctccacttcggtttgtaagtgcccggaggcggagttatacagtgccagtccggtataaaacgtcacaatatttccgctggctttggctaattgctgacgcgctttttcttccgtcagcggtttgccggtgatttcgccgtccagaacacaaatttggtcggagccaataatcaaatgattcgggaaacgcgcggcgagcgattgcgccttcgcctgcgccagccgcagcaccaactgacgcggcgcttcgcccggcatgggggtttcatcaacatccggcgcggcgcattcgaaaggaatcgtcagcttttccagcagcgcgcgacgccagggagaggtagacgcaaggatgagacggggcatattttttccctcagatatagcgtaatgatgagagccatcttaaactatgctcttcggtcttcaagcctgtcatactgactcgtcttgagcgaaaataagtctgtaacccgcaatgtgtgcgaattattggcaaaaggcaaccgcaggctgcctttttctttgactatatgacgttacgaagttaatatgcgcgccctatgcaaaaggtaaaattacccctgactcttgatccggttcgtaccgctcaaaaacgccttgattaccagggtatctatacccccgatcaggttgagcgcgttgccgaatctgtagtcagtgtggacagtgatgtggaatgctccatgtcgttcgctatcgataaccagcgtctcgccgttttaaccggcgatgcggtcgttacggtgtcgctcgaatgccagcgttgcgggaaaccgtttacccatcaggttcacacaacgtattgttttagccctgtccgttccgacgagcaggctgaagcactgccggaagcgtatgagccgattgaggtaaacgaattcggcgaaatcgatctgctggcgacggttgaagatgaaatcatcctcgccttgccggtagttccggtgcatgattctgaacactgtgaagtgtccgaggcggacatggtctttggcgaactgcctgatgaagcgcaaaagccaaacccatttgccgtattagccagcttaaagcgtaagtaataggtcttccccgcggacgcagggataaaccgtaattgaggagtaaggtccatggccgtacaacagaataaaccaacccgttccaaacgtggcatgcgtcgttcccatgacgctctgaccgcagtcaccagcctgtctgtagacaaaacttctggtgaaaaacacctgcgtcaccacatcactgccgacggttactaccgcggccgtaaggtcatcgctaagtaatcgcgcgatactcgatgccttttgcatcacaggcgtgcctgtggtgtaaaagccgaagagtacaagcgtgataaagcttagtgaggatttctccgcgtaagcggagaacaccgaaccaggcagcgacgataccttgacacgtctaaccctggcgttagatgtcatggggggcgattttggtccttccgtgacggtgcctgcagcattgcaggcactgaacgctaattcgcagctcactcttcttttagtcgggaatcccgatattatcacgccattacttgccaaagctgactttgaacaacgttcgcgtctgcagattatccctgcacagtcagttattgccagtgatgcccggccttcgcaggcgatccgcgccagtcgtgggacatccatgcgtgtggccctggagcttgtgaaagaaggccgagccgaagcttgcgttagcgccggtaataccggggcgctgatggggctggcgaaattattgctcaagcctcttgaggggattgagcgtccggcgttggtgacggtattaccgcaccagcaaaagggcaaaacggtagtgcttgatttgggtgccaacgtcgactgtgacagtaccatgctggtgcagtttgccgtgatgggcgccgttttggcggaagaggtcgtcgggatcaaaaatccccgcgtggcgctactcaatatcggggaagaagaaaccaaaggcctcgacagtattcgcgaagcctctttaatgttaaaaacagtcccaaccatcaattacatcggctaccttgaggcgaatgagttactgacgggaaaaaccgatgtactggtgtgtgacggctttacaggcaatgtcacacttaaaacgatggagggggttgtcagaatgttcctttcactgctgaaatcacagggcgaggggaaaaaacggtcgtggtggctgctgttattaaaacgttggttacaaaaaagcctgacgaggcgattcagtcacctcaaccccgaccagtataatggcgcctgtctgttaggattgcgcggcacggtgataaaaagtcatggtgcggccaatcagcgagcatttgcagtcgcgattgaacaggcagtgcaggcggtgcagcgacaagttcctcagcgaattgccgctcgcctggaatctgtatacccagccggatttgaaccgctggacgatggcaaaggcgtaaacctgcgggcgcacagataatatcgttgtctccccggcgccgccagcgtgccagacgtttacaggtaacggtatataaccgaaaagtgactgagcgtacatgtatacgaagattattggtactggcagctatctgcccgaacaagtgcggactaacgccgatctggaaaaaatggttgagacctctgacgagtggattgtcactcgtacaggtattcgtaaacgccatatcgccgcgccgaatgaaactgtcgcgacgatgggctttaccgctgcgaatcgcgcgattgagatggcggggatcgataaagaccaaattggcttgattgtggtggctaccacatcagcaacgcatgcatttccaagcgcggcatgtcagattcaaagtatgctcggtattaaaggttgcccggcgtttgatgtcgcggcagcgtgcgcaggtttcacctacgcgttaagcatcgccgaccagtacgttaaatccggcgcggttaaacacgcgctggtggtcggttccgatgtattagcccgcacttgcgatcctggcgatcgcggtacgatcattattttcggcgatggcgcaggcgcggccgtactgagcgcttctgaagaaccgggtattatctccactcatcttcatgccgatggccgttacggtgaattactgaccctgccgaatgccgatcgcgtaaatccggataacccgatttacctgacaatggcgggcaatgaagtctttaaagtggcggtcactgaactggcgcatattgtcgatgagacgctggcggctaataacctggatcgctcagaactcgattggctggtgccgcatcaggctaacctgcgtatcattagcgcgacagcgaaaaaactcggcatgtcgatggacaatgtcgtcgtcacgctggacaggcacggcaatacctccgcggcttctgtgccgtgcgcgctggatgaagccgtgcgtgacgggcgaattaaagccggtcagctggtattgcttgaagccttcgggggtggattcacctggggctccgcgctgattcgtttctagtataaggatttaaacatgacgcaatttgcatttgtgttccccggtcagggttctcagagcgttgggatgttggccgagatggcggcaaattaccctatcgtagaagaaacgtttgctgaagcttctgcggctctgggatatgatctgtgggcgctcacccagcaaggtccagcggaagaactgaataaaacctggcagacgcagccggcgttattaaccgcttccgtcgcgctttggcgcgtttggcagcagcagggcggtaaaatgcctgcgttaatggcaggtcacagcctgggcgaatattccgcgctggtttgcgctggcgtcatcaactttgctgatgccgttcgtctggtggaaatgcgcggtaaattcatgcaggaagcggttccggaaggcactggcggcatgtctgcgatcatcgggctggatgatgcctctattgctaaagcctgtgaagaatctgccgaagggcaggttgtttcgccggttaactttaactcgccgggacaggtggttatcgccgggcataaagaggcggtagaacgtgcgggcgcagcctgtaaagccgctggcgcgaaacgcgcgctgccgctgccggtgagcgtaccgtcgcactgcgcgctgatgaaaccagcggcagataagctggcggttgaattagccaaaattacctttagcgcgccaacggtgccggtagtgaacaacgttgacgtgaaatgtgaaaccgatgccgccgctatccgcgatgcgctggttcgccagttgtacaatccggtacagtggacgaagagcgtggaatttatcgcggcgcagggcgttgaacatctttatgaagtgggtccaggtaaagtcctcactggtctgacgaaacgtattgtcgacaccctgacagcgtcggcgctgaacgagccggcggcgctgtctgcggcacttacgcaataaaagaggaaaaccatgagctttgaaggaaagattgcgctggtgactggtgcaagccgtggcataggccgcgcaattgcagagactctcgttgcccgcggcgcgaaagttatcgggactgcgaccagtgaaaatggtgcgaagaacattagcgactatttaggtgctaacgggaaaggtttgatgttgaatgtgaccgatcctgcatctattgaatctgttctggaaaatattcgcgcagaatttggtgaagtggatatcctggttaataatgccggtatcactcgtgataatctgttgatgcgaatgaaagatgatgagtggaacgatattatcgaaaccaacttatcatccgttttccgcctgtcaaaagcggtaatgcgcgctatgatgaaaaagcgttgtggtcgcattatcactattggttctgtggttggtaccatgggaaatgcaggtcaggcaaactacgctgcggcgaaagcgggcctgatcggtttcagtaaatcactggcgcgtgaagttgcgtcccgtggtattactgtcaatgttgtggctccgggttttattgaaacggacatgacgcgtgcgctgtctgacgatcagcgtgcgggtatcctggcgcaggtgcctgcgggtcgcctcggcggcgctcaggaaatcgccagtgcggttgcatttttagcctctgacgaagcgagttacatcactggtgagactctgcacgtcaacggcggaatgtacatggtttaatcacgattgaaaaatatttgcgttattagggcgaaaggccgcaaaataacgtaaaatcgtggtaagacctgccgggatttagttgcaaatttttcaacattttatacactacgaaaaccatcgcgaaagcgagttttgataggaaatttaagagtatgagcactatcgaagaacgcgttaagaaaattatcggcgaacagctgggcgttaagcaggaagaagtaaccaacaatgcttctttcgttgaagacctgggcgcagattctcttgacaccgttgagctggtaatggctctggaagaagagtttgatactgagattccggacgaagaagctgagaaaatcaccaccgttcaggctgccattgattacatcaacggccaccaggcgtaagtgaacatctccaggcggtcgttcgaccgcctgagttttatctttttgtcccactagaatcattttccctccctggaggacaaccgtgtctaagcgtcgtgtagttgtgaccggactgggcatgttgtctcctgtcggcaataccgtagagtctacctggaaagctctccttgccggtcagagtggcatcagcctgatcgaccatttcgatactagcgcctatgcaacgaaatttgctggcttagtaaaggattttaactgtgatgacattatctcgcgcaaagaacagcgcaagatggatgccttcattcaatatggaattgtcgctggcgtacaggccatgcaggattctggccttgaagtgacggaagagaacgcaagccgtattggcgccgctatcggctccggtatcggtggtctcggtctgatcgaagaaaaccacagttcgctggtaaaaggcggaccgcgtaagattagcccgttctttgtcccgtcgacgattgttaacatggtagcaggccatctgactatcatgtatggcctgcgtgggccaagcatctctattgcgactgcctgtacttcaggcgtgcataacatcggccatgccgcgcgtatcatcgcctatggcgatgcggacgcgatggtggcaggtggcgcagaaaaagccagtacgccgctgggtgtaggtggttttggcgcagcgcgcgcgctgtcgacccgcaacgataacccacaggcggcgagccgtccgtgggataaagaacgcgatggttttgtactgggcgacggtgccggtatgttggtgcttgaagagtacgaacatgcaaaagcgcgtggtgcgaaaatctatgccgaaatcgtcggctttggtatgagcagcgatgcttaccatatgacgtcgccgccggaaaatggcgcaggcgctgcgctggcgatggttaacgcgttgcgtgatgccgcgattgagcctgctcagattggctacgtcaacgcgcacggcacgtcgacgcctgccggcgacaaagctgagacgcaggcggttaagtcagtctttggcgatgctgcaagccgagtgatggtgagctcgaccaaatcgatgaccggccatctgttgggcgccgcaggcgcagtagagtctattttctctattctggcgctgcgcgatcaggccattccgccaaccattaatctggataacccggatgaaggttgcgatctggacttcgtgccgcatgaagcgcgccaggtcagcgatctggagtacgctctgtgcaactcctttggttttggcggaactaacggttccttgatctttaaaaagatctaagttaagccagagacagacattaataaaaaggtccgcttgtcgggccttttttatcaggcatatcacctcttgttctgcgttattcatcctgccacactaacaggcgacggataaggagccactatgtttttaattaatggccatgcgcaggatcaacttgctgtaagcgaccgggcgacgcagttcggcgatggcagttttacgaccgcacgtattgttgatggcaacatttgccatctggaagcgcatcttcagcgcttgcaggttgcctgtgaaaaattacggatcgcttttagccattggtcgacccttcggcaagagatgacaatgttggccacagggcatgattcaggcgtgttgaaagtgatcattagccgtggtagcggcggccggggatacagcgccatgaattgtcaggcagctacccgaatcctctccgtttctgcttatcccgcttattattctcagtggcgtaagcaaggcatcactcttacccttagtcccataccgcttgggcgcaatccttatcttgccggattaaaacatctgaaccgcctcgaacaggtgttgattcgctctcatcttgagcagacggacgccgatgaggcgctggttcttgacagcgagggatgggttacggaatgctgtgcggctaatttgttctggcgtacaggcgacattgtttttacgccgcgtctggatcaggccggggtgaacggcattatgcgacaattttgtttacgccaactggcgcaatctcctttccaggttcttgaagtacaggcgagagaggaggcagtcaggcaggcggatgagattatcatctgcaacgcgctaatgccgattattcccatacgcgcctatcacgggacgtcgtattcttcgcgaacactgtttcaatttttagccccattttgtgagcatccgaattagttatgaaaaaattgtcaggcgttttccttctgctgttggttgtgctgggtattgccgtgggcgtggggatgtggaaagttcgccatctggcgaacagcacgttacttattaaagacgagactatctttacgctcaaggcgggaacggggcggctggcgcttggtgaccagctttatgatgaaaaaatcattaatcgcccccgggtatttcagtggctgctgcgcgtggagcctgagttatcacactttaaagcgggaacttaccgttttacgacggggatgaccgtacgggagatgcttgagttgctggagagcggcaaagaagcgcaattcccgttgcggtttgtggaagggatgcgccttagcgactacctgaaacagctacgagaggcgccgtatattcgccatacattgccggatgatgactacgccactgtcgctcaggcattaaagcttgcgcacccggaatgggtagaagggtggttctggcctgatacctggatgtataccgccaacaccagcgatgtcgctattctcaagcgagcgcatcaaaagatggtgaaagctgtcgatactgtctggaaaggtcgggccgaggggctgccttataaagatcagaaccaactggtgacaatggcctcgattattgaaaaagagacggctgtcgccagcgaacgcgatcaggtggcctcagtctttattaatcgcctgagaatcggtatgcgccttcagaccgatcccaccgtgatttacgggatggggacgagttataatggtaacttgtcgcgtgcggatctggaaaagccgacggcttataacacgtataccataaccgggctgccgccaggaccgattgcatcgcccagcgaagcgtcattgcaggcggcggcgcatccggcgaaaacgccgtatctctattttgtggccgacggtaaaggcggtcacacatttaacaccaatcttgccagccataatcggtcagtgcaggagtacctgaaagtgcttaaggaaaaaaatgggcagtaattatatcgtcatcgagggcctggaaggcgccggaaaaaccactgcgcgcgacgtggtggtggagacccttgagcaactgggtattcgtaatatgatttttacccgtgagccgggcggtacgcagcttgccgaaaaactaagaagtctggtgctggatattcgatcggtaggcgacgaagtgattaccgataaagcggaagtgctgatgttttatgccgctcgcgtacagctcgtcgaaacggtaatcaaacccgcgctggcgcaaggcgtatgggtgatcggcgatcgccacgatctctcgacccaggcgtatcaggggggagggcgcggcattgatcaaaccatgctggcgacactacgcgatgccgtgctgggcgattttcgtcctgacctgacgctgtatctggatgtcacgccggaagtcgggctaaaacgcgccagagcgcgcggcgatttggatcgcattgagcaggaatcttttgatttctttaaccggactcgcgcgcgctatctggaactggcggcgcaagactcgcgtatccgcaccattgacgcgacccagccgctggatgccgtcatgcgcgacattcgcgccacggtgacgaagtgggtgcaggagcaagcggcatgaaatggtatccatggttacggcccgcctatgaaaaactggtagaaagttaccaggcgggacgtgggcaccatgcgctactgattcaggccttacctggcatgggcgacgaggcgctgtgctatgcgctgagccgttatctgttatgccagcagcctgagggccacaaaagctgtgggcattgccgtggctgtcagcttatgcaggctggcacgcatccggactattacacgctgacgccggataaaggcaaaatcagcctcggcgtagatgcggtacgcgaggtcagcgagaaattgtacgagcactcccgtctgggcggcgcgaaggtggtgtggattgcggatgcggcgctattaaccgacgccgccgccaatgcgttgctcaaaacgctggaagagccgccggagcaaacctggtttttccttgccagcccggagcctgctcgtctgttggcgacattacgcagccgctgccggctgcatcatctggcgccgccgtccgaatcgtatgcgatgtcatggctgtcgcgagaagtgacggcgtcacaagaagcattgctcacggcgctacgtctgaatgcggggtcgcccggcgccgcgctggcgctgttgcagtctgaacgctgggcgcagcgtgaggcgctgtgtcaggcgttaatggacagtttgcatacgggcgactggtatgcggtattaacggcgctcaatcatgagcaagccccggcgcgcctgcactggctggcgacgctgctggtagacgcgctgaaacgtcagcacggcgcgtcgtacctgacaaacgttgatgcggacgcggttgttgccgcgctggcggggccgctatccccggcgcgtattcaggcaatcctgaacgatgtttgccattgtcgtgatcaattacttcatgtgaccggattaaaccgcgaactggtattaaccgatctcattctccgcatcgagcattacctgcaaccaggcaccttgttgcctgttcctcatctttgagagagacattatgtttttagtcgactcacactgccatcttgatggtctggattatcaatctttgcataaggacgtggacgatgtgctggcgaaagccgccgcgcgcgatgtgaagttctgtttagcggtggcgacgacgctgccggggtatcgccatatgcgcaagctggtgggcaagcgcgataatgtggtcttttcctgcggcgtgcatccgttaaatcaggatgaagcatatgacgtagaagaactgcgcctccttgctgcagaagacgatgtggtggcgatgggcgagaccgggcttgattacttttacacgcctgagaccaaaatccgccagcaggcgtcttttattcatcatatccagattggccgcgaattgcataaaccggtgattgtccatactcgcgacgcgcgtgccgatacgctggctatcctgcgcgaagaaaaagtgacggattgcggcggcgtactacactgttttacagaagacagagaaacggccggcaaattgttggatctggggttttatatctctttttccggcatcgtaacgttccgtaacgctgaacagttgcgtgatgcggcgcgctatgtgccgctggatcgattattagtcgagaccgattctccttatctggcaccggtgccgcatcgcggtaaagagaaccagcctgcgatggtacgcgacgtcgcagaatatatggcggtattgaaaggggttgccgttgaagaactggcgcagatcaccaccgataactttgctcgcctgttccatattgacgcgtctcgcctgtcatcaatccgttaaacgagtttttttaaagctcgtaattaataaacaaaacgcgtaaagttcaccgccacaaaaggggcggtgagcgagcttatggaaacattcggaaactcattttggcagaatgtgatactttttaggctatctggcgctgaaacgtgatagccgtcaaacaaaatcagacgtatttattttactctgtgtaataaataaaagggcacttagatgtcctgtccacggcggggttctcccccctcgccaatgcgtgagaacgtagaaaagcacaaatactcaggagcactctcaattatgtttaagaatgcatttgctaacctgcaaaaggtcggtaaatcgctgatgctgccggtatccgtactccctatcgcaggtatcctgctgggtgtcggttccgctaacttcagctggctgccagccgttgtatcgcacgttatggcagaagcgggcggatctgtttttgccaatatgccgctgattttcgctatcggcgtggcgttgggcttcaccaacaacgacggcgtttcggctctggcggcggtagtcgcgtatggcatcatggtgaaaaccatggctgtggttgcgccgctggttctgcatttacctgctgaagagatcgccgctaaacaccttgctgatacgggtgttctcggggggattatctccggtgcaatcgcagcgtatatgtttaaccgcttctaccgtatcaaactgcctgagtatctgggcttctttgcgggcaaacgcttcgtgccgatcatttcgggtctggccgctatttttaccggtgtggtgctgtctttcgtatggccgccaatcggtacggctatccaggcgttctcgcagtgggcggcttatcagaacccggttgtcgcgtttggtatttacggttttatcgagcgttgcctggtgccgtttggtctgcatcatatctggaacgttcctttccagatgcagatcggcgaatataccaacgcagcgggtcaggtattccacggcgacattccgcgctatatggcgggcgacccgacggcaggtatgttgtctggcggcttcctgttcaaaatgtacggtctgccggctgcggccattgctatctggcactctgctaaaccggaaaaccgcgcaaaagtgggcggtatcatgatttccgccgcgctgacctcgtttttgacgggtattaccgagcctatcgagttctccttcatgttcgtggcgccgatcctgtacattattcacgcgattctggcaggtctggcattcccgatctgtatcctgctggggatgcgtgacggtacgtcgttctcccacggtctgatcgactttatcgtgctgtccggtaacagcagcaaattgtggctgttcccgattgttggcgccggttatgcgattgtgtactacaccgtgttccgcgtgctgatcaaagcgttggatctgaaaacgccgggtcgtgaagacactactgatgacgcaaaagcgggggcgaccagcgaaatggcgccggctttggttgcggcgtttggcggtaaagagaacatcactaacctggatgcctgtatcacgcgtctgcgcgtgagcgtagccgatgtagcgaaagtggatcaggctggcctgaagaaactgggcgcggcaggcgttgtcgtcgcgggttccggcgttcaggctattttcggtacgaaatccgataacctgaaaacggaaatggatgagtacatccgtaacagctaagcagtaatgatgttggggagaattaaggcagccattcggctgccttttttaatggcgctttacatgccgctctccgacagtctgtcagaactgataattggcggtgaggctgacgttacgcggtgcgccgtaaacaatggaaccatcaatattggtgtcgtaggttttatcaaacaggttgttgatgtttccctgtacggagaaatttttcgtcacctgatagcgggtaaacagatcgaccagcgcatagctgccctgttcggcgcggaaagtgccgtacggcgtcgtggtatctttgtaaacccgattctgccagttcacgccgccgccgaccgtcagctccggtatcgccggcagacgatagcgggtgaataacttcacgctggtgcgcggaagattagggttcacggcgttaccttcattgtcctcggcaacataccgggtagccccgaaagtcatctgccagttatcggtaattgcgccgttcacttcaaattcgacgcctttgctcaccgttccgtcagtagacttccaggcaaactccccattactgccagggatgggaatagtggttgcctgagcgacgttattctgctcaatgcggaacacggacaacgtggtggtgaggcgactgttcatccagtcggacttcagacccgcttcatagttattaccggtaatcggagccagatattgacccgctttgtcgcgtttattctgcggctgaaagatagaggtataactggcataagcggaccagttgtcgttgatatcataaatcagcccggcatacggcgtggtatggtttttctccatgctgtaggtcagtgtatcaacacgccagttggtataacgagcgccgagaatcagatgcagcgggtcggccagcgaaatgcgcgtagcggcatacagcgatttcatatgcgtggtatcgtcctgcgccagattttgtggcgcccagtgggtttgggggaaattaccgttaaaggcgctgaagttgccaatgtcgtccggaaagacgttcgcccaggcgctaaaatagcggttattctgtttactataactgccgccaaacatcatattgtgctgacggccaaacagctcataagcgccatcggcaaagagatctatggcatctactttgcgcttgccgctgttccagcccgtaccgccgaccacggggtagcttgcgccataaggactcaccagcgtacctgtctctttatcgactaacgcatcgatatacatcattttactgtcgaatttgacctcagtatgggtcgcattcagggtcgcctgccagctttcggcaaaacgctgtttaagcgtgacgaagaatttatttatctctttgttgttataagcccagtccggggcggtactacgcgcgcggtcatagctatttttgctgccatcggtgttccagcgcggcagaccgccccaggttgggctgttgacatcaattttttgatattcataaccggctgaaaggttggtggttgtacccagatcggcatcgacaattccggaaaagaacgctttctcactgttatagcggtccagccaggaatcattattctgataacccgccacgatgcgcccacggacattaccgtctgcggtgagcggactttgcagatccatgacgtaacgctgcttattccagctaccgtattctgtggagacgttacctttgaactcccgactggtggcgtgtttacggatcatattaattgaggcagaaggattaccggtcccggtcatcagcccattcgcgccgcgaaccacctccacgcgctcatacagcgcggtatccgttagcgcatcgcccagattccagcgggactcaaaatacgttggaataccgtcaaccatatagttgtcaatttcaaacccgcgcgagtaatagctgatgcgatcggagtcagcctgacttccgctgatccccagcgtattggtcatcacctcgcccagggtttgcaactgctggtcttccatacgctgctggctgacaatactgaccgactgcgggatatcgcgctgagtcatcggcattttggtgcccgctgcggtcgttttcatgctgtaatcctgttcttcacggtttacggcgtcagcggtcgtctcgccttcgacaataacggtatcctcagccgcgaaggcggcaggcataaatgccatcgccatacccatagctaacagcgacggtgcggcggtggacggaaggtgtttgtcccggcggtattgaatgaaagacatctgaaaatccttgcttgttattggggtaagttcaggacgtatgacgttgaaccttttcattctttgctagttaatgcgcataaaaatgcaaatgagaaatatacgcatttgtattaaatgtgtaaaacggtataaccagggaaactagaaatattttttaagcgtacaaaggcgtcatggctgggggatatggcggtaagtccagcatgtagtcatttttcgcttaataaatcgtgggttaaagttgaaagagcgtcggtaactcgctcatactctatactcgcagtatggctcggcgtagcatgtgcgctgcaagggctattatgaaaaaggaaaacgtcgtggcagaagaaactatattcagcaaaattattcgtcgtgaaatcccttcggatatcgtttatcaggatgagctggtcaccgcctttcgtgatatttcaccgcaggcgccgacgcatatcttgattattcccaatatcctgatcccaaccgtcaatgacgtgacggcggaacatgaacaggcgttaggtcggatgatcaccgtggcggcgaaaatcgccgaacaggaaggcattgccgaagatgggtatcgtttaatcatgaataccaaccgtcatgggggccaggaggtttatcatatccatatgcacctactgggcggccgcccgctaggcccgatgctggcgcataaaggcttgtaagtatgatcaaaggatgcatcgcggtttctctgggcttgctgctgcttaccggctgccggtcacaccctgaaattccggtaagcgacgcgcagtcgctggtgatggagtccacggttctggcggcgggcgtcaccgcagagccgcctgaactgacggcgtctgatatccagccatcagcctcttcccgcgtctataacgaaaggcaagagcccataaccgttcattatcggttttactggtatgacgcgcgggggctggagatgcatccgctggaggcgccgcgtagcgtaaccatacccgcgcgttcgtcggtaacgctatttggcagcgccaattatctgggggcgcataaggtcaggctttatctttatttgtgaggagtgaattttgatgacaaaaatgcatcgctacgctgccattgctgcgctggcgatatttctctccgggtgtatggcgcaacgtcaacctgcgccagttgaagaggtaaaaccagcgccagaacaacccgcgcagccgccgcagcctcctgttgtgccgtctgtgccaacgattccacagcaaccggggccgatcgaacatgaagatcaaacgggccagccagcgcctaaggtgcgccactatgactggaacggcgcgatgcaaccgctggtcagcaaaatgttgcaggctgatggcgtgacggccggaagcgtattgcttgttgacagcgtgaataaccggacgaatgggtcgttaaatgcgaacgaggcaacggaaacgttacgtaatgcgctggcgaacaacggtaaatttacgctggtgtccgtacagcaactctcgatggcaaaacagcagttaggattgtctccgcaggatagtctgggaacgcgcagtaaagctattggcattgcgcgcaatgtcggggcgcaatatgtactttactccagcgcatccggtaacgttaacgcgcctgcattacagatgcagttaatgctggtgcaaactggcgagataatctggtcaggtaaaggtgcggtccaacaacaataatcccttaacgcgcgacgagatcctgtcgcgctattttccccagtatcgtcccgccgtcgccacatcgcaggggctaagcggcgggagctgtattattgcccacgatactcaccgtgtcgtgctgcgccgtcatcacgaccctgacgctccaccagcccattttttacgtcattaccgcgccttatcccaattgccggccagtcttgcgccgcgagcgcttttttatactccaggctggatggcggtagaatatctgcatggtgtggtaaattccgctctgccagatgccgacgaactggcggccttactgtatcatttgcatcaacagccgcgttttggctggcgtatcgcgctatcgccactattggcgcagtactggtcgtgttgcgatccggcaaggcgtacgccgttttggttgcggcggctcaaacagttgcaaaaaaacggtgaacctcgcccgcttcggctcgcgcctttgcatatggatgtccatggcgacaatatagtattaacgtccgccgggttgagactgattgactgggagtatgccggcgacggcgatattgcgttggagctggcggcagtatgggttgaggatgaacgccagcaccgacaactggcagacgcttatgccgcgcgcgcgcgaatcgacgcccggcagctatggcgacagatacgattatggcacccctgggtcattatgctaaaagcagggtggttcgaataccgctggcgacaaaccggcgagcaacaatttatcaggctggccgatgaaacctggcgccagctacgtatgaaaggataaggagagcagtgtgggcccagtaatgttgaatgtcgaaggatgtgagctggatgcggaggagcgcgagatactggcgcatccgctggttggcgggcttattctgttcacgcgtaattaccatgacccggaacagttgcgcgaattagtgcgccagattcgggcggcatcgcgtaaccatctggtggtggccgtcgatcaggaaggcgggcgcgtacagcgtttccgtgaagggtttacccgcctgcccgcggcgcaatctttttttgcgctgcatgggctggaagagggggggcgactggcgcaggaggcagggtggctgatggccagcgaaatgatcgcgatggatattgatatcagttttgcgccagtgctggatgtcgggcatatcagcgcggcaattggcgagcgttcttatcatgccgatccagcaaaagcgttggcaatggcaacgcgctttattgacggcatgcatgacgccgggatgaaaacgaccggtaagcatttccccggccacggcgcggtcacggcggactcccacaaagagacgccgtgcgatccacgtcctgaaacggacatccgtggcaaagatatgtcggtgttccgcacgctgattagcgagaataaactggatgcgattatgcctgcccacgtgatctaccgcgctatcgatccgcgtccggcaagcggttcgccgtactggctgaaaacggtgctgcgtcaggagttaggctttgatggcgtcattttctccgacgatctgtcgatggagggcgcggcgattatgggcagctatgctgagcgcgctcaggcgtcgctggatgcgggttgcgatatgattctggtctgcaataatcgtaaaggcgcagtcagcgtgctggataatctgtcgccgatcaaagcagaacgtgttacacgtttgtatcataaaggttcattttcacgccgggagctcatggactcagcacgctggaaaacagccagcgcccagctcaaccagttacatgaacgctggcaggaagaaaaagcaggtcattaactcgagttttcgtgagggtgccagatgattatttatttacacggttttgattcaaatagtccgggcaaccatgaaaaagtgttgcaattacagtttatcgacccggatgttcggctggtaagctacagtacgcggcatcctaagcacgatatgcagcatctgctgaaagaagtggacaaaatgttgcagttgaatgtggacgagcgccctttaatctgtggcgtggggctgggcggttactgggcggagcggattggctttttgtgcgatatccgtcaggtggtttttaacccgaacctgttcccctatgaaaacatggaggggaaaatcgatcgcccggaagaatatgcggacatcgctacaaagtgcgtgaccaactttcgcgaaaaaaatcgcgatcgttgtctggtgatcctctcgcgtcatgacgaagcgctggacagccaacgctcagcgcaagcgcttcacccgttttatgaaattgtgtgggatgaggaacagactcacaaattcaaaaatatttcgccgcatttgcaacgtatcaaagcgtttaaaacgctgggataacgccatccggcaatatggcgttatcagtgaccggataaccagccttgcggctggtttttttatgctcaattctcgcaaactgtctatcttttcagcatgaaaacttgatgcacatcaattttggtatgaccaatgcaccgttcatgctattctcatatcagaagcttattctcattaacgtaacttgttgttaattaaaggctatgctaataacttttaattaacaattggttaataaatttaagggggtcacgttgactacaccattaaaaaagatcgtgattgtcggcggcggcgctggcgggctggaaatggcgacgcagttaggccataaactggggcgcaagaaaaaagcgaaaatcacgctggtagacagaaatcacagccatctgtggaaaccattgctgcacgaagtggcgactggctctctggacgaaggcgtggatgcgctgagctatctggctcatgcgcgtaatcatggtttccagttccagctggggtcggtgatggatatcgatcgcgaagcgaaaaccatcaccattgccgagttgcgtgatgaaaagggcgaactgctggtgccggagcgcaaaatcgcgtatgacacgctggtgatggcgctgggcagcacctctaatgatttcaacacgccgggcgtgaaagagcactgtatcttcctcgataacccgcatcaggcgcgccgttttcaccaggagatgctgaacctgttcctcaagtattcggctaatctgggcgcgaacggtaaggtcaatatcgccatcgttggcggcggtgcgacgggggttgagctgtcggctgaactgcataatgcggtaaaacagctgcatagctatggttataaggggctgaccaacgacgcgctgaacgtgacgttggttgaggctggcgagcgtattctgcctgcgttgccgccgcgtatctccagcgccgcgcataatgaactgaccaaactgggcgttcgcgtgctgacgcaaactatggtcaccagcgccgacgaaggcggtctgcatacgaaagaaggtgaatatattcaggccgatctgatggtgtgggcggcgggtatcaaagcgccagattttatgaaagagattggtggtctggaaacgaaccgcattaaccaactggtggtggaaccgacgctgcaaaccacgcgcgatcctgatatttatgcgattggcgactgcgcttcctgcgcacgtccggagggaggttttgtgccgcctcgcgctcaggcggcgcatcagatggctacctgcgcgatgaataacattctggcgcagatgaatggcaaaccgctgaaagcttaccagtataaagatcatggatcgctggtctctctgtccaacttctctaccgtgggtagtctgatggggaacctgacccgcggttcaatgatgattgaaggacgtatcgcccgcttcgtgtatatctcgctataccgtatgcaccagatagcgctgcatggatactttaaaaccggcctgatgatgctggtgggcagtattaaccgcgtcattcgtccgcgcctgaaactgcattaatttctctgcgtctcaccggctgctcgcgccggtgagcgcttctccatcactcgcttcggagttgtccgaatccttcagctttaccgcctcatcccgcatttttcatcctcattccgattggctttgttcgcatactggttgcaaaattgttaccaatagcaacgaaggaggaactcccgtgaataaatcaatgttggcgggtatagggattggcgtagcggctgcgctgggtgtggcggcagtggccagtctcaacgtatttgatcgtggtccgcaatatgcgcaggtgatatcggctaaaccgattaaagagacggtaaaaacgccgcgtcaggagtgccgtaatgtcacggtcacgcatcgcagaccggttcaggacgaaaaccgtattgccggctcggtgcttggcgcagtagcaggcggcgtgattggacatcaatttggcggcggtcgtggtaaagatgtggcgacggtcgtcggggcgctgggcggcggttatgctggcaatcaaatccagggatcaatgcaagaaagtgatacttacactaccacgcagcaacgctgtaagacggtgtatgacaaatctgaaaagatgcttggctacgacgtgacctacaaaattggcgatcagcagggcaaaatccgcatggataaagaccccggaacgcaaattcccctcgacggcaatggccaactggttctgaataacaaagcataaaaaagctgtactctgcaagttagcccctcattcgctcaggctgaggggcttttttttatccgaagccgcgtcgttcaggacttgatcagttcaggccagatgcgcagagtcgtacgcgtaatttgcatcagttgttcgaaggtggcaccttcacgggcgctgatcgacattccctgtaaaatacagtttatatattctgcgagcgcctgcgggttacagtgcgccggaatttcaccgcgctcctgacgttggcgcagaaactggatgagcgtctgttcctgcatggcgtggcgtgattttaccgtgcgggcgatatcgcgcgaggaggcggccagggtggcggacgtattaatcataaagcagccagccggcgtgtctgtactggtaaagcaggcggcaatttctgtgaagtaatcttccagcgccgattctacgcttttctcttcacaaaagagctgggcttcgtgttttgaggcaaagcgagtgatgtagcgatccaggacagcgcgaaataatccttttttgttagtgaattccgcatagagagtaggcgctttcgccccggtagcctctacgagatcggcaagcgaagttgcttcatagccgtgctgccagaagagagtcatggccttatcaagcgcggcttccctgtcgaacacttttggtcggccacggcttttcttcgcgcaactcgtggtatccgttgtcatgatgccgttgtacctgtttaaagagcggtctctctattataaaaacaaaccacttctggctccagagtattcattagaaaaataaatcaattctattcacatgaaaaataacatctttataaattatataacgatcattataaaaagaggttgacgtgtgatgtagatcacatctatgattaacttatcgatcgttaagttaatgcttacgacacccattcatctgctaaaggtcatcactatgaaaaacgtaaaaaacctcatcgctgctgccgtactgagttcgctctcattcgccagcttcgccgccgttgaagttcaggcaacgccagaaggtcaacagaagttcggcaccatttccgcgaatggcggcacgaatctgggctcgctggaagatcagctggcgcaaaaagcgcaggagatgggggcgaagtctttccgtattacctctgttaccggcccgaataccctccacggtacggcggtaatctataagtaagcattaaccctcattaatgccgctgcgattgccacaataaaaagaaaaagcctcgcgatgcatcgcgaggcttttttgtcggtcagctattcacgcttacagcgactgcggtttcgcctctgcttgacgggttacatccactggcattccggaacgcacttccataacatgttccatcaccgcagcatcggtctgcggcgcgtccttaaaggcctgcatcgggccattcagcacaatcggcaacacctgcggatcgtcgcctatatttttagacagcggctgatgaacttccaccagtcgcacgccgcctggctccaccgaggctttaatcggcgtattgataatattcactttggttcccggcgtgacctgacggaacaatgtctctatatcaccgtcgcgcagacggatacagccggaactgacgcgcataccaatgccaaaatcggcattcgtgccatgtaacagatagacgccgccgtaggccgctaaacgaatcgcgtgatgtcccattgggttatcgggaccggcaggcaccacggcggggagatcgataccttgcgctttataacgggcgcgaatattggcggtcggcgtccaggttggattggcgcgtttatccgaaatggtcgtcaccatcgttggcgtcagggtatcgccgcccagttggccaatcccgatagggtagaccgtgaccgtatttttccccggttgataatagtaaagccgtaattccgcgaggttaatgacgataccttcacgtggcgcgtccggtagcagcgtttgcagcggaatcgttagcacgctgcctgcgcgtggcacataaggatcaatgccggggttggcctgtaacagggctaaaaagcccacgttatattttttggcgatcgcctccagcgagccgccgtcgtcttcaacgacatggaatttattttctcccaccagtcgactgccggggggcggaagaggccacgtattcgcctgcgcgggaagggcaagcatgatggtcgcggtaagcgcaagcaacgcccaccagcgagagagtcgcgtattgttgaacattataataaacccatgattattatgtggttatttttataaaagaggaaataagaattatggcggttggctgtgtctggaactgcagggaagtgcaaagaatttgtaaagattaggccggacgcagagtaatgacgcccggcctgacgcttatgcaatagcgttttcttccagttgctgcataaactggcgtacccagtctatacgcgttttacgttcgcttaaatcctgaataaacttgaggcgcgtcgggccatccagacggaaatgctgcggctgtttttgcagcaacccgataagccaggcggggtcaacgtggtttttctcggcgaactcaatcgttccgcctttctcgttaccctccagttttcggatgccgagcttttgcgcctgttggcgcaggcgggcgatatccagcagattacgcgccggatcgggcagcaggccgaagcggtcgatcaattccactttgatctcctccagctcgttttcgttcttcgcgctggcaatgcgtttatagaatgacagccgggtattaacatccggaataaaatcatccggcagtaacgacggcattcgcagctcgacttccgtttgctgactggtgagatcttccagcgagggttcgcggcctgctttcagcgcatcaacggcgttttccagcaattccatgtagagtgagaagccgatggtttccattgagccgctttgctcttcgccaagcagttcgcccgcgccgcggatctccagatcgtgggtcgccagcgcaaacccggcgcctaaatcctccagcgacgcaatcgcctccagccgtttttgcgcatcggtggtcatggccttaggatgtggcgtcaacagccaggcgtaggcctggtggtgcgagcgcccaacgcggccacgcagctggtgcaactgcgcgaggccgaaatgatccgcgcgttcaatgatgatcgtgttagcggtgggaatgtcgatccccgtttcgataatggtagtacacaccagcacgttaaaacgttgatggtggaaatcgttcatgacccgttccagctcacgttcgcgcatctgcccgtggcctatagcgattcgcgcttccggcaccagttccgccagccgctctgcggctttctgaatattttcgacgtcattgtacaaatagtaaacctgaccgccgcgcaggatttcacgcagaatcgcttcccttaccaccaggctatcatactcgcggacaaaggtttttaccgccagacgacgggcagggggggtggcgataatggagagatcgcgcataccgctcatcgccatattcagcgtccgcgggatcggcgtcgccgtgagcgtcagaatatcgacatcggcgcgcatcgccttaattcgctctttgtggcgcacgccgaaacgatgctcttcatcgacaatcagcaggccgaggtcgcgcagcttcacatcgctttgtagcagtttatgcgtaccgatcagaatatcgatcttaccctcggcggcttccgccaggatttgtgtctgctctttggcgctgcgaaagcgggacagcatctcaatgcgtaccggccagttggcgaaacggtcgcggaagttgtcatagtgttgctgcgccagcagcgtagtcggcaccagtaccgctacttgtttatggttttccactgccaagaacgcggcgcgcatcgccacttcggttttgccgaagccgacgtcgccgcacaccagcctgtccatcgccagcggttggcacatatcgctcaatacggcgttaatcgcctgtgcctgatcgggcgtcgtttcaaacgggaagctgtcgcagaataactgatactgctcacgatcatgcttaaaggcaaaaccctcttttgccgcccgttgcgcataaatatccaacagttccgctgcgacatcgcgcactttttccgccgctttctgccgggcgcgcgaccaggcgtcgccgcccagtttatgcagaggcgcactttcttccgcgccgccggcatagcggctaatcagatgcaatgaggagaccggcacatacagtttggcgtcattggcgtaggtgagcatcagatactcacccttgatgccgccagcctccagagtggtcatgccggcatagcgtccgacgccgtgctccagatgcactaccggctgaccgacgtggagctccgccaggttacgaatcaacgtatccgggttgatcgtgcggcgggaatccaggcggcgacgcgccacccgctcacccaaaagatcgctttcacaaatcagcgccagattgcgttgggtgtcgataaagccatgttctgcggcgccaatcatcagatagcgtcccgcatcctgcgcctcgtccaggcgtaatatccgcttcggcgcgatttttatgcgagccaggagctctcccagagcttcgcggcgtccttcgctttccacagaaaaaatcaccggaccgctgaaagattcgaggaacttacgcagcgcgtccagcggcgctttctgctgcgcctggatagccaaatccggtaatttctggaaaccgagattggtattggcggctttttccggcagatggtcggttttaagctggaggcgaggccagcgtttaagctcggaaaagagctcatccacccgtagccagagggcttccggcggcaaaagcgggcgcataggatcgacgccacgattttcaaaacgcgccagcgtatcggcctgaaagcgttcggcgctggtttccagcgagccggtattcaccaccagagtattggcggggaaatagctaaataatggcggtaacggttcgctgaaaaagagcggctgccagtattcgatcccggcgggcagagtgcctttgctgacctgctgatagatgtgctcggcgtcgcgttttacctcaaaggtatcgcgccactggctacggaaaagctcaatagcggctttgtcggtaggaaattcgtgcgcgggcaacaaattgatggcctcgacctcctccagcgtacgctgggtatccgcgtcaaacagacgcaggctgtcgatttcatcatcaaaaaagtcgaggcgataaggctgttcgctgcccatcggaaagagatccaacagcgcgccgcgcgtcgcgtattcgccatgctccatcacctgatcgacatgccgataaccggcgctgtcaagctgcgcgcgcagagcgtcgcgggacagccgctggccttttttcatcaccagcgcatgaccatgcagatagctatgcggacaaacgcgctgcatcagggtgtttaccggtacaatcaagacgccgcgctgcatcgacggcaactggtagagcgtggacaggcgcgaagagataatttcctgatgcggggagaagctgtcatacggtagcgtttcccagtccgccaggttcatcaccatctgatcggtaaactggcggatttcatcatgcaatcgcagagcattttgcatgtcaggcgctatgagtaccaccggaccggcatggcgttcggctatctccgccaccagcgtagcgcaggcggcaccggtaagttcgcccaactggcgctgatcgcccgcttttgtcggcagcgtgtaacgttgtttttcaggcataacggttgtcagtatctctttttgttttacgccgcactctacgcgtcacccttcaggctgcttcatggttggctgcacgccgggacagcatgaaggactcaggtattcaggggcatatgactgataagcaatgttctttattatccgcgatcgttgtttattagcaaattgaatccgccgcataacgcgccgaacaggtaaagtatgaacatgtaagtgacttgatttgtcggcctttttcagaataacgctgacgaactcttacggttcagacatttacgcattccgctttcgcttatatactcgggactttgctaacagcaaccagacggattacatgtatcaacctgtcgctctattcattggcctgcgttacatgcgcgggcgtgcagcagatcgcttcggtcgcttcgtttcctggctttccactatcggcattaccctgggggtgatggcgctggtcacggtattgtcggtgatgaacggttttgagcgcgaactgcaaaataacattcttggtttgatgcctcaggccatcctctctgctgaacatggttctcttaacccgaatcagatgccggaaaaagcggtgaatctgcaaggcgttaaccgtattgcgccgctgacgacgggcgatgtcgtactgcaaagcgcgcgtagcgttgcggttggcgtgatgttaggtatcgatccggcgcaaaaagatccattaacgccgtatctggtcaatgtgaagcaaagcgaattacagccgggtaagtataatgtcatcctcggcgagcagctcgccggacagttaggggtcaaccgcggcgatcagattcggctaatggtgccatctgccagccagtttacgccaatgggacgcctgcccagccagcgtctgtttacggtgattggcacatttgccgccaatagcgaggtcgatggctatgaaatgctggtcaatattcaggacgcgtcgcgtttaatgcgctatccggcaggcaatattaccggctggcgtctgtggctggatgaaccgctgcaagtcgataccctcagccaacagacgctgccgcaaggcacgaagtggcaggactggcgcgaacgcaaaggcgagttgttccaggctgtgcgcatggaaaagaacatgatgggattgttgctgagcctcatcgtggcggtcgcggcttttaacattattacttcgttgggcctgatggttatggagaagcagggtgaagtggcgattttacaaactcaagggctgacgccgcgacaaattatgatggtctttatggtgcagggcgccagcgccgggattatcggcgcgctgttgggcgccgcgctgggcgcattgcttgccagccaactgaataacctgatgccgatcatcggcgcgtttctggatggcgctgcgttgcccgtggcgatagagccgttacaggtgatcgttatcgcgctggtggcaatggccatcgcgctgctttctacgctttatccttcctggcgcgctgccgccactcaacccgctgaggctttacgttatgaataagatcctgttgcaatgcgacaacctgtgcaaacgctatcaggaaggcaccgtacaaaccgacgtgttgcacgatgtcagcttcagtatcggcgaaggcgaaatgatggcgatcgtcggcagttccggttcgggtaaaagtacgttgctgcatctgttaggcgggctggatacgcccacctccggcgatgtgatttttagcggccagccgatgagcaaactctcttctgcggcaaaagcggaattacgtaaccagaaactggggtttatctatcagtttcatcatctcctgccggattttacggcgctggaaaacgtggcgatgccattattgattggcaaaaagaaaccggcggagattgacgctcgggcgcgagaaatgctgcacgccgtagggctggagcatcgcgcaacccatcgaccttcggaactttccggcggtgagcgccagcgtgtcgcgatagcgcgcgcgttggtgaataacccgcgtctggtgctggcggatgagccgaccggtaatctcgatgcgcgtaatgccgacagtatttttgagcttctgggcgagttaaatcgtctgcagggaaccgcgtttctggtggtgactcacgatttgcaactggcgaaacgtatgagccgccagcttgagatgcgcgatggccgcctgacggcggaactgagcctgatgggggctgagtaatggcgtcgcctttatcattgttaattggcttgcgtttcagccgtggacggcggcgcggcggtatggtttcgctcatttccgtcatttctaccatcggtatcgcgctgggcgtggcggtgttgattgtcggtttaagcgcgatgaacggtttcgaacgcgagttgaataaccgtattctggcggtggttccgcacggggagattgaagcggtcaatcagccgtggaccaactggcgtgaagcgctggcaaaagtgcagaaggtgccaggcattgccgccgccgcgccgtatatcaattttaccggcctggtagagagcggggccaatttgcgcgccattcaggttaaaggcgtcgaccctaagcaagagcagcagcttagcgcgttaccgtcatttgtgcaaaatcacgcctgggatcatttcaaagcgggcgagcagcagatcattatcggtaaaggcgtcgccgatgcgctgaacgtgaaacagggcgactgggtgtccatcatgatccccaatgcgaatgccgaccataagctgctccagcccaaacgcgtgcgtttgcatgtcatcgggattctgcaactgagcggccagctcgatcacagcttcgccatgatcccgcttgaggatgcgcagcagtatctggatatggggtccagcgtttccggtatcgcgcttaaagtccacgacgtgtttaatgcgaacaaactggtgcgtgacgcgggtgaagtgactaacagctatgtctacattaagagctggatcggcacctacggctatatgtatcgcgatatccagatgattcgcgccattatgtatctggcgatgattctggtgatcggcgtggcctgttttaatatcgtttccaccttagtgatggcggtaaaagacaaaagcggcgacattgcggtattaagaacgctgggggcgaaagatggtttgattcgtgccattttcgtctggtacgggctactggcgggcttgctgggcagcttgattggcgtggcgatcggcgttgtcgtttcgcttcagcttaccgccattattaatgggattgaaaaggcgatcgggcatcagtttttgtccggcgatatctattttatcgacttcctgccatccgaattacattggctggacgttgtttacgtactggtcacagcgttgttgttaagcttactggcgagctggtatccggcgcggcgggcgagcaacattgaccctgcgcgagtattgagcggccagtaatcgcggaatataaaaacaaggagcggtgatgtattacgggtttgacattggcggaacaaagattgcgttaggcgtatttgactcaacgcggcggctgcagtgggaaaaacgggttcccacgccccataccagctatagcgcctttttagacgccgtatgcgaactggtcgaggaagccgaccagcgatttggcgtaaaagggtcggtagggattggcatacccggtatgccggaaaccgaagacggcacgctgtacgccgcgaatgtcccggcagccagcggtaagccgttgcgcgccgatctcagcgcccgactggatcgcgatgtgcgtctggacaatgacgctaactgttttgccttgtccgaagcctgggatgatgaattcacgcaatatcctttggttatggggcttatcctcggcaccggcgtcggcggtggcctggtgctaaacgggaagccgattaccggtcagagctatatcaccggcgagtttggtcatatgcgtttgccggttgacgcgctaacgttgatggggtttgattttcctctccgccgttgtggatgcggtcagatgggctgcattgagaattatctgtccgggcgcgggtttgcgtggctatatcagcattattatgatcaatcgctgcaggcgccggagattatcgcgttgtgggagcagggcgatgagcaggcgcacgcgcatgttgagcgctatctggatttactggcggtttgtctggggaatatactgacgattgtcgatcccgatttattggtgatcggcggcggactatcgaactttacggcaataacaacgcaactggcggaaagactgccgcgccatctcctccctgttgcccgcgcgccgcgcattgagcgtgcgcggcatggggatgcaggtgggatgcgcggtgctgcttttttacatcttaccgactaatcaaaaaaagaggttgttatgcagtcgcgtcggtttcatcgattaagccgctttcgtaaaaataaacgtctgttgcgtgaacgtctgcgccagcggatctttttcagagacagagtggtgccggaaatgatggaaaacccaagagtattagtccttacaggtgcaggaatttctgcagagtctggtattcgtacgtttcgcgcggcggatggcctttgggaagagcatcgggttgaagacgtggcaacgccggaaggattcgcccgtaatccggggctggtgcagacattttataatgcccgccgtcagcagcttcaacagccggaaatacaacccaatgcggcgcatctggcgttagcgaagcttgaagaagcgcttggcgatcgctttttgctggtgacgcaaaacatcgacaatttgcatgaacgcgcgggcaatcgcaacatcattcatatgcatggcgagctgttgaaggtgcgctgttcgcaaagcggccagattctggaatggaacggcgatgtgatgccggaagataaatgtcactgctgtcagttcccggcgccgctacgtccgcacgtggtgtggtttggcgagatgccgcttggcatggatgaaatttatatggcgctgtcgatggcggatatttttatcgccattggcacgtccggtcatgtctatccggctgcgggttttgtgcatgaagcaaaactgcacggcgcacatacggtggaactgaatcttgagccaagccaagtcggcagcgagtttgaagagaagcactacggcccggcaagccaggttgtgccggaatttgttgataaattcctgaaagggctgtagtgctgtttgcccggtaacgccttatccggcctacatttcacgttacgttcatctgtaggcccgacaggcgctttggctgaattagcgtcctgcttttagcttctgataatactcttcataaatggcgctggcgtcgccgacatcgttttgccactcgcctttgctgatggtttgcgcatccggatagagcgacttatcattggcgacctccgggcttaacagcttacgcgccgccaggttgggggtagggtagccgatggtttctgccacctctttcgcgacgtcaggacgcagcaggaagttgattagcttcagcgcgccctctttatttttcgcgtttgccggaatagccaggctatccatccagaaaataccgccttctttcggccagacgacctccagcggcgtgccagcctgacgagcaacgaaggccgaaccgttccacaccatccccagattgacttccccttccatatacggattcgccggattatcggagttgaaggccgctacgttcggcatcagttttttcaactcttcatatgccgcttcgatctctttcggatcggtagtgttaccggaataacctagcttgcgcagcgccatctggaagacttctcgcgcatcgtcggttaaaagcaggctgtttttatattccggtttccacaagtcagcccagctggtaatggtttttggatcgatagcatcgctgttcacgccaatcgccgttgcgccccagatatacggaacagaataatcgttgttggggtcaaacggtttgttgagcatttccggatcgaggttgtggaaattggttaatttcgacttatcgatcttctggatcatgccttctttgcgcattttgtcgacatagtatgtagaaggaacaaccaggtcatacgcgccatctttataggttttgagtttggcatacatggtttcgttcgactcgtaggtcgaataaatcaccttaatgccagtctctttagtgaactgttccagcaggcccggcggcacatactcagtccagttatagaaatagagcgtgtcgttgtcggaggcatgagcggcactcatacccagcgccagggcgcccgccgcgagcaggtggcgtgaccattttttcatttaacgtcccctgaattacgggccttatcggcccttggttttatcacgagcaataagctggctggcaatgaccattaccagagacagcaccaataaaacggtcgccagcgcgttcacttctggtgaaacgccgacttttaccatggaataaatctttaagggtaaaatttcatagcccggcccggtgacaaacgacgagaccactacatcgtccatcgacaacgtaaagctcagcaaccagcccgccgccaccgccggcatcgccagcggcagaatgattttgcgtaaaatcgttacctcactggcccccaggtcttttgcggcttccagcattctgacatcaaagcctttcaggcgcgaatagaccgtgacgaccacaaacggcaggctaaaggtgatgtgcgagaacagcaacgaccaaaagcccagttgaatgccgagtaacataaacagcaccagcagggagatcgccatcacgatatccggcgacatcattactacaaacagcatcccgctgacgaatggcttcccgcgaaagcggtagcgataaagcgccaccgcggttaacgagccaatcaacgtggcgaaggtcgctgaaaaaatcgccatcgtcagtgaatgttgagcggcctgcaacagactgtcgttattgactaggagttcgtaccatttagtggtaaagccctgccagttaatgccgaaccgcgaactgttgaaggagttcacgatcagaataatgatgggaatatacagatacgcatagatggcagtcatgaaaccgccacggagcagccgaccgatcattcaagttccaccttcttattcagaggatggggtgcttttagagtattgaaaatgatcaattttttctcttctccaaaatctctccaaaacgtctcgcggttatcagcagccaggaagaagcaagctgccgcttgaagccgcgaattttacaacaaattgccagacgagcgggaaaaaaaggccatttaaatgactattctcatccgatccggtcatatgcggcattattgtgcctggcaagaggttactcagtaggcaaacaggaagtacgtgagtaaaccctgaacgtgacgtctgagaaagcgtcgtctgattttataaaaaacaacataaacagccgctttgttgttctgagcgaacgtgtagcgtggttaactgttcttccgccattttttgtatagcctgggggtctattctaaaaatggcgtgaaaaacctgatcagagatggcttcgactatctcagctaacatactttggctggtgctgggatccgttacgaggaacgcctgaaacgtcttatccgctagtaaaacctcttttaccattttttcaataggtatgtgggtatgcggtggtggtatttcaagctgttttaatccacacatcgccattgtttctaaaaatgcgttttgctgagtactttcggatatattcgcatggtgtaaaatgcgcgttgtcttttcaatcccagactgaattttcgctgccaggtaggttgccttttcttgcgctttccacccatctaaatgtccttttctcaattcagtatataaatacccctctatgttgtctaatggaaccgataatatcggcgcgccagcaggattgagacataatgtcgaagggagggggtagtctacgatttcgctatatcttctcttaatcatggccgtcatttgtggatgcgattttaaaatatccgggcgatctttcattaaaaaataaagattccccatgacttcacagctaaaggtatcggtattttgagtgatacgtaacaattcgttctcttcgttttgatccatgatgcgaagaataatggtggcatcattttcatgaggattatgaacctgaaatctatctctttgcgatgcgcaggctaactctttcaactcaaaaaaaatctctgtaagccgctctcgtgtgggggcgcgttcggcaaacaacatctcatgtagacaacggtccgcttttgctttgccagtagaaaaaaagaagtctttaattttttcccataaaactttccaccatgcttctttcgtattccttggggagttggtaaggatttcactttttaaaaaaccattccctatagtaatcggcatattaatctcacttatactggagtaaaaatgactacataattgattaaatcgaccctttttatctcaactgcgggcgcatcggatgtaatataatttttaaaagagactggcaatcagtataaaacctgagagcttcgcgtataaacgcattactgtctgtgatagcgtcgctacaggtaaaaataaaagaaggactaccgcggatgatgttgtagatttgcaatactggcggcaacttctttcatgcgttttttatgccgaaggcatgaagtttacccttgaataaacttcatgcctggatgcgtgtggatttgttagcgttgcgcaattaatcgcttatatcactcaccttcttattcaataagcgggaagcccgccagtaaatcaacagcatgagtcccatcacaatggtcagcgtaatgctggtagccgcgccaaacggccaatcgcgaatattcaggaactgtaccttaatgacgttaccaatcagcaggtttttcgcgccacccattaaatcggagacgtagaacaggcccattgccggtagcatcacgagcaggcaaccggcgacaatgcccggcatggttaatggaataatgatgcggatgaacgtttgcattttactggcgccgagatcgcgtgcggcctccagtagtggtttgtcgagcttctcaatgctggagtagagcggcatgaccataaatggcagcaaaatgtaaaccaggccgataataacggcgctcggggtgaacatgatgcgaatcggtgtatcaatcacgcccagccacagcaggaattcattgagataacctttagtgctcaggaatattttcagcccatagatgcggatcagtgagttggtccagaaaggaacaatcagcaaaaacagcaataacggacgtatcttttccggtaacttcgccagaaaccaggcaaaaggatagcccagcaccaggcaggagagggtggcgatcagcgccatattcagagagtgcaggagcacttcaaaatagagcggatcgagcaggcgcgcgtagttatccagcgtaaagaccatcttgacgaaactggcgtcgtcacgggtcagaaagctggtgccaatgatcatcaggttgggcagaaaaacaaataacacaagccaaccgacgatagtgacaatcactacattctggaatttacttgtgttcttcatcagccagtacgacctcccagctttctacccaactaatggccattttttggtcaagtgaatggtcgaagtcaggatcgtcttcgttgaagaattcgctgaccatcaccattttgccattttccagttcaaccaccgactccagcgtcatacctttataattgcgctcgcgcacgtagccgataagcccttcgatgtggttatcatcgttgatctcttcgacgcgtagatcttccggtcgcagcaggacgttcagtttttggcctggttcgacagcgaaattgacgtatatattgcactcccgaccttctacgctggcgcggacgcgctgttcatcaagccgttcaatgacggttgcgtcaaagcggttaatttcgccgataaaaccggcgacaaacaggttttttggctcttcatagatttcacgcggcgtgccgtcttgctcaatcacgccattacgcattaccacgatacgatcggacatggtgagcgcttcttcctgatcgtgagtgacaaaaacaaacgtgataccgagtttacgctgtaatgctttaagctcgttctgcatttgtttgcgcaatttatagtccagcgcggaaagcgattcatccagtaataacaggcgaggtttattcaccaccgcgcgagcgatagccacacgctgctgctgtccgccggaaagctggtgcggtttacgttgtgcaaactcttcaagctgcaccatacgcagcgcatcggtcacgcgaggcgctatctcggcggctggcgttttttgcatccgtaagccaaacgcgacattttcaaacaccgtcatatgcggaaataaagcgtagctttgaaatacggtatttacataacgattttcggcgggaacgtgggtgatatcctggttatccaacatgatatgcccggcatcaacggtttccaggccggcaatcaggcgaagaacggttgttttaccgcagccggaagggccaagcagcgtgaggaattcgccattgttaatggtcaaatccagttgcgaaatgacctctttgccatcgaaacttttgctaattcccgacaaaagcaccagcggtgaaagcgaacgcggttgattattcaatttcttactctgtcccatgtaaacgcaacggatggctgaccgctgcggggtttgtggttaaccaccttaatcactcttaatgagggcggtcattctacggcaaaccactgtgatcgccaatccttgttgcgaattactgacttagctttatagtcagaaagcgtgtcaaagtgaaatattcttgtttgcagggataaaagtgacctgacgcaatatttgtcttttcttgcttattaataatgttgtcacgaaaagtgagggtgactgcatggataaactacttgagcgttttttacactacgtatcgctggatacccaatcaaagtcgggtgttcggcaggttcccagcactgaggggcagtggaagttactacgtttgctcaaacagcagctcgaagagatggggctggttaacattacattaagtgaaaaagggacgttgatggcgacgctcccggccaatgttgagggggatattcccgccattggttttatctcccatgtggatacctctccggatttcagcggtaaaaacgttaacccgcagattgtcgagaattatcgcggcggcgatatagcattagggattggcgatgaggtgttgtcacccgtgatgttcccggtactgcatcaattactgggacagacgctgattactaccgatggtaagacattgctgggcgcggacgataaagccggcgttgcggagatcatgaccgcgctggcggtgctgaaaggtaatcctattccccacggcgacattaaagtggcgtttacgcctgacgaagaggtagggaaaggcgcgaagcacttcgatgttgaggcctttggcgcgcagtgggcatatacggtcgacggcggcggcgtgggagaactggagtttgaaaacttcaatgccgcctcggtgaatatcaaaatcgtcggcaataacgtgcatcccggtacggcaaaaggcgtgatggtcaatgcgctgtcgttggcggcgaggattcacgcggaagtgccggcggatgaagcgcctgaaaccaccgaaggttacgaagggttttatcatctggccagcatgaaaggcaccgttgaccgggccgaaatgcactacatcattcgcgatttcgaccgtaagcagtttgaagcgcgtaaacgcaaaatgatggagattgccaaaaaagtcggtaaggggctgcatccggactgctatatcgaactggtgattgaagacagttattacaatatgcgcgaaaaagtagttgaacatccgcatattctcgatatcgcccagcaggccatgcgcgactgtcatattacgccggagatgaaaccgattcgcggcggtacagacggggcgcaactgtcgtttatgggtctgccatgtcctaatctctttaccggcggatataactatcatggtaaacatgagtttgtgacgctggaggggatggaaaaagcggtacaggtgattgtgcgtatcgcggagctgacggctaagcgcgggcagtagcgaatgttacgcattgtggtgaagcgttttattatttatggcgggatattttccgccataaatttttgtctatggaaaacccccagctaggctgggggttccggaaagctttcagctttaagccagttattaaaaccccttttgatttgttaaaacatcttgcggtctggcaactgcaaaagttcaacaagaaatcaaaagggggtcccaatgggggacgaaaagagcttagcgcacacccgatggaactgtaaatatcacatagttttcgcgcccaaataccgaagacaagcgttctatggagagaagcgtagggcagtaggcagcatattaagaaaattgtgtgaatggaaaaacgtacgaattctggaagcagaatgttgtgcagatcatattcacatgcttctggagatcccgccgaagatgagtgtgtcgagtttcatgggatatctgaagggtaaaagtagtctgatgctttacgagcagtttggggatctaaaattcaaatacaggaacagggagttctggtgcagagggtactatgtcgatacggtgggtaagaacacggcgaagatacaggactacataaagcaccagcttgaagaggataaaatgggtgagcaattatcgatcccgtatccgggcagcccgtttacgggccgtaagtaacgaagtttgatgcaaatgtcagatcgtatgcgcctgttagggcgcggctggtaagagagccttataggcgcatctgaaaaacctccggctatgccggaggatatttattctgcctggagcgccgaatatacgccttcctggtcccagcgccagcaacaatctgcagcatgttttatgactggcgatgaaacctgcatgacgtttattgatgatgcggtgaggctggcctcgcagcaatatggcaaacgctcaatacagcttgttcgtagcctgctattacaaagcgatatttatcaatggctgggtaaaccggagttaacgccgcaaatgctgctgcgagcgcgggcaataatgaaaacatttccggcggacacttatccgggcgatcgggccgatatgtttgaacacctggcggcctttaatgtttacagtgacgatcgttatatagagtattcaccgacagagcagtggcgatacgagatcaaggttgattaccgtcagcagatagcctggcaagagcaggcattaacgtggcgtcttaaagacaaaaaggcatcgacggaagcattggtttataccttaaacaggatgcgcgacgcttattctgatgcgctggaagagcgggatgtcgaatgtgatagtgcgcgtaaagcctattatttggcgaagatagacgcaacggagcggcagtggctgagcgttattttacgagataaaacctgggataatcgtgagcgcgtcgcctcttttttgcagcagaaagcggatattgcttataatgcagggcatattagcgaggcgattaatgcgctaagtcaggcgctaaaaattgagcaaacgctttatggcgccgaattcggcgaaatgacggttgacagcaataatcttgctggcttttatgcacagggccatcattataaggaagcgaaagatctctaccttaaacttatcgcgtattaccagagccgtttaacgccaatggcgacggtaatatcacgattacgcttttatttgcccgaaaacatcgacctggacagtacctccctctatctcccattgctggcagaatataaacgtcggcagtccgacgtatcaatggtgttgtatggtatttcgctgctttatcagagtaatcaagaacttgaacaagcaaaagactttgcggaacgcgcctttacgcttgatgccgtagcttatccagcaaagatgcagtatgaacgattacagcaactggctaatattgccgaaggtcttggagataacgtactggcgcggcgctatcggcaaatgtcatttcgccatcgaatggcccactcgatttatccgggcgatccgcaatataacgatgtcgccaaacctggcggcgatcgttgtggatagtttgcgtcagcccggcggtcgccgggcattgcgatgttcttatccttcgaagaaccagtacccgctattcaccagcgccgccagcatcgcgaggaaggacgggtcttccagcgcatcgccgaagttttcagcggtcagtgcaatatgactggcgagcgcctccagagcggggcgatgcggagagtctattttttcgccattcgcatagacctcatcgccgatacgcaatacgcgaagcccgccgagacgtactaatacctcgccttgctttaaggcatcgtaaatttcatcaggctgatacggcggctccggcggcgcaatatccagttcgtggcgtgactgagagagaaactcgccaagccactgttggaaatgcgcgggttgattgatcaaatcgagcatcatattacgcagtttatccatctcctgcggcaggatatccgccggatgcttgcgggacggcatatccggatcgctgtagtatgtattgcccaactcccgttgcaggacgtaatcggcaaaaccgctgatcagctcacggctattgggcgcgcgaaaaccgaccgaatagttcatggcgttttccagcgcatagccttcatgcgggaatcctggcggaatatacagaatgtcgcccggctccagctcttcatcaataatggcctcgaacggttcgacttgtaacaggtcgggatgtgggcagtgctgacgcatttgcagcttttcgcccacgcgccagcgacggcgaccggttccctggataataaacacatcatactgatccagatgcgggccaacgccgccgccgggaacggaaaaggagatcatcagatcgtcgatacgccagtccggcagagcgcggaacgggcgcatcaacgcggcggtgggttcgtgccagtggtttaccgcctgtaccagcagcgaccagttgctctcacccagatgatcgtagctttcgaaaggaccatggctgacctgccatttgccatcctgatggctaacgagtcggctgtcgatttcgctttccatcgccagccccgccagctcatccggcgagagcggatcgataaagttgctaaacccacgttttaagaccaccgggcgtttttgccagtggcgttcaagaaagtcgggccagttaagagttaattggtattccatgttaagtatccgcaggctggtatctgacaccgattataacggatgcttaacgagatgcgtggaagaacgcacagaaatgtttattcctctttctgtgtgggatgctgtcggccaaaaacgacctccatacgggcgccaccgagcagactgtcgctggcaatgatctgcccggcgtattgttccgtaatctcgcgcgcgacagccagccccacgccttgtcctggtcgtagggtatcggcgcgctgaccgcgatcaaacaccagggaacgtttgctgtggggaatgcctgggccgtcatcttcgacgaaaatatgcaaatgatcgtcggtctggcgagccgaaatctcgacaaactccagacaatatttacaagcgttgtccagtacgttgcccatcacttcgacaaagtcgttttgctcgccgacaaaactgatttctggtgaaatatccatactgatattcacccctttacgctgataaactttatttagcgcagaaatcaggttatctaacaacggcgcgacgggatgcagttcgcggcttaacaacacgccgctaccgcgcatactggcgcgatgcagataatagccgatctgctgggaaatccggctgatctgttccagcatcaccggttcagctttgctgacgctcatcttttcgttgcgtaaagagcgtaacgtactctgcaaaaccgcgagcggcgtttttaaactgtgcgtcaggtcggtcagggtcgtgcggtatttgttataacgttcacgctcgcttttgagcagttgattaaggttgcgcacaaggctggtcagctcacgcgtcgtctccggattgagcatttcgcggtgatgatcttcaagctcgcggacttcccgcgccagcgcctcgatagggcgtaagctccaccaggcggcgatccacagtaaaggaatgactaacagtaaattggcggccagcacgtatacgaaccagctccacaccatataggagcgttttagttctatcggaatggtatcgaccaccacgatggttaactgcggcatccgcgccgtggcaggataaatatttaccgctaccgagtgggtcatctcggcatcatcgtcatcttcacgtacttctttgagtttttcctgcgcggaatggtcttcgctcaacagcgtgctggtggcgtctacgttggtttcaatttcatggaagccgttcgtttttaaccattccggttgaatgcttttaatcagccagggaatgttgcgctgcgtccataataatttgcccgtttcatcgtaaatcagcgtcatggtcgggctttgcatgtccagattttcaggcagctcaacgctgattttattattttcccatttggcgagggtataaaacaggttgctttcgccgcgcagcaaacgaaaggtggttttatcaaaacttacgctatagccgaccagcgccactatgccatatgccaaagaaagcaccagcacgacgccggctgtcgccagcaaaaaacgaacccgcagcgacagcggcagaaaatggcgagcaaatttattcattagcgcaattcaaaaagatatccttgtccgcgtacggtggtaatgacatcgtgcggatactgggcctgtatttttttccgcagacgccccatgagaacatcaatggtatgactttcccgcagttccgcatccggatacagctgaagcatcagcgaatctttgctgaccactttaccgttgttacggataagcgtttccataatggtgtattcgaacgccgtgagtttgatgacctcttcattgacggataattcccggcgtgagagatccacctggaacggcgggatgttgatcacctgggaggccagaccgctattacggcgcattaacgcctgcatacgcgccattacctcttcgatgtggaatggcttcgtcacgtagtcatcggccccggagctgagaacctcgactttatcctgccagccttcgcgcgcggttaacaccagaaccggcagtgaaacatcactgctgcgccagcggcgtattaaggaaaggccgtcttcatccggcagacctaaatcgacaatagcgatatccggaaggtgttcattaaggtagtaatcagcttccctggcatcttctgcggcatcgacctggtgacctgaatcctggagctgaaccttcaggtggtggcgtaataatgcattatcctctacaaccagtacgcgcatcatctcttctcccttgtgttaacaataagaacagtctagcgttgattatggtgctttggggataaacagttaataaaccagacaaatagtcaccctctttctgaagaaaagagggtgaggcaggcattatttaagttcgtcgaccagagtcacagcgcgaccgatataatttgccggcgtcatggctttaaggcgcgttttttctgcttccggcagggccagactatcaataaactgtttcattccttcggcatcaacacgcttgccacgggtcaactctttcagtttttcatatggtttttcaataccatagcggcgcatgacggtctggatcggttcggctaatacttcccagttgtgatccagttcgtcaagcagatgatcgcggtttacttccagcttgctgacgcccttcagggtggactgataagcgataagcgcatagccgatgccgacacccaggttacgcaggacggttgagtcggtcagatcgcgctgccagcgggaaaccggcagtttgtttgccagatggtgcaacactgcgttagacagaccgaggttgccttctgagttttcaaagtcaatggggttaactttatgcggcatggtagaagaaccgatctccccggcgatggttttctgtttgaaatggttcaacgcaatatagccccagacatcgcgatcgaaatcgatcaggatggtgttaaagcgcgcgatacagtcaaacagttccgcaatataatcatgtggttcaatctgggtggtgtaagggttccactggatgcccagcgaggtgacgaactcttcgctgaactgatgccagtcaacttccggataggcggcgatatgcgcgttatagttgcctacggcgccgttgattttaccgaggatctccacctggttgagctggcggaactgacgctccatccgatacgccacgttcgccatctctttacccagagtggaaggtgttgccggctggccgtgggtgcgggagagtagaggaatatcgcgatactgcgtggcgagatctttaaccgcgttaatcacctgacgccagtaaggcaggatcacttcatcgcgcgcggttttgagcattaacgcgtgcgacaggttgttaatgtcctcagaagtgcaggcaaagtggataaattcggaaacgtcatgtagcgccgggatcgcggcgactttttctttcaggaaatactcaactgccttcacatcatggttagtcgtacgctcaatggttttaatgcgcgcggcatcttcttcattgaagtttgccacaagcgtatccaggtaaccgtttgcgtcggcagcaaaagcaggaacttccttgatcgctgcgtgcgcggctaatttctgcagccaacgtacttcgacttgtacacgaaatttcagcaaaccgtattcgctaaaaattccgcgcagcgcgctgactttatcgccgtagcgtccatcgacaggggaaacggcggtcagtgaggataattccatagatcataactccggggttaaatgagcaagaatttgttttgcctgagtcgtcaggcgatgacgagaaaacataagctgtaggcgaccaccgcctacctgatgccagagcacggctgcacggatgcctgccagtagcgaggcgcggactttggcctgcacctgcggactttgcagaacggccggggagcccgtcacctgaatgcgcgggcccaatgggctaatcacatccacgtagatgcccgccatggcgctcattaacgtgtctgactgtaaatcaaaatgatcaagctggcgctgcaggccgttaatgcgatcgcctaacgtattcaatgcgcctttggcggatgacagcttgcgctccagcaccatcaggctaagcgtataacgcgtcagttcggcgttaagtccttgtcggctgctggcattcagcacgccgagcagtgtttccagaccaagacgcaggttggcttcgctgccgccgaacacgcccagagtagaactgggattcatatcaatgacactgttgagtgaaacgtgcaacgcgtcggcatcacagtgtccctggtgcgccagttgttgcaccaggcgtgccgactggcaaatgccagacagcgcgagggtgatgtcataataattctttgccacaatcactgcttccttgtatcaaataaaatacacttcatcttttaagccgctttgaggcgacttgaatggtgttgtgtattgaataatcagaccgtcagcggcagtcgctgctcgataatgccgccgcccaggcagacttcgccgctgtaaaagacagcggactggcccggcgtaacggcggcaaccggctcgtcaaaaatgacctcgatacgatcgtcattcagcgcgttaatcgtgcacggaatatcggtctggcggtagcgggtttttaccgtacagcgcagggtgccggtgaacggttcgcgatcgacccaatgtagctgctgggcgatgaggcctaccgacatcaggcgtgggtgctcatgcccctgggcgacaattaacacattgttttcaacgtctttatccaccacataccaggggtcttcgctaccgtctttggtgccgccgattcccagccctttacgctgaccgagcgtatgatacatcagaccctgatgctcgccgatttcatcgccgtcaacggtaatgattttccccggctgcgcaggcagatagcgccctaaaaagtcgcggaatttgcgctcgccgataaagcagataccggtagaatcttttttctttgcggttaccagccccagatcttcggcgattttacgcacctgcggtttttccagctcgccaaccgggaacagactttgcgcaatctgctcatggccaagcgtatagaggaagtagctctgatctttgttaccgtcgagcccgcgcaacaaccggcttttgccgtttacatccgcgcgacggacgtagtgaccggtggcgatatagtcggcgcctaaatcttctgcggcaaattcaaggaaggctttaaatttgatctctttattgcacagaatatccggattcggcgtacggcccgctttgtactcttcaaggaacagttcaaagacgttatcccaatattctgcggcaaaattaacggtatgcagttcaatgccaagcttgtcgcacacggcctgcgcgtcagccagatcggctgccgcggtacagtattcctcaccatcgtcctcttcccagttcttcatgaacaggccttctacctgataaccctgttgttgcaacagccaggcggaaacggaggaatcgacaccgccggacatgccgacgatcactttttttgggctttctgacattggaatactcgcgacattgaacttcaaggcggcgtattctatcacgcagccctttacttgacaccctctgtaaacggccagttaaattcgcccactatagataaggggtaacgttgtcccgtttgataactgcgaacgctttcagccaccagcggagaacgtaaattcggcgcgttcagaatctcgtcggcgctcacccaacggcagcaatcgatgtcattgtcatgggggtcggtcgcgcaaatatgatcaagcttgatagcgaataaaaagcgcaggaacggggttttatccggcgcaatccactgatgcatacggataaaatactgtggttgcgccgtgatgccagtctcttcccacagttcacgcgcggcggcctgcgccagcgtttcatctgcctccaggtgtccggcaggttgattccataacgatttaccgttgatggtctcttctaccaccagaaatttatcttcggcatgtacgatgcaggcaacggtcacgtgcggcttgaacataggcatccttattaaagcggtttatcaatgtggtcatagatcacgtcaagctgtttcagacgctcgttataagcttttgtcaggcaggtgacgtcggccttgcactgctgacgctgtttaagccagctctgctgggcgtcctgcagggcgccgcgactgcccatcgcgaacaaccctttcagaaactgatatttggtgtgcatttccacgtctttatcattcagcgtcaggtgcgcgcagatagccttttcatccgcagcctgcgctttctggcagtcgaagctggccgcattaacggataacggtgttaataaagcaaaagcaatgagaagccgtttcatctgtctttctcctgtgcgatctcgcgccactgtccattatcgaggccgttgagcgtgtagtcgcccatgctgtaacgaattaatcgtagagtgggatgaccgacatgcgctgtcatgcgtcttacctggcggttgcggccttcatataaggtgacttttagccaactggtgggaatattcttccgttcgcgaatcggcggggtgcgcggccacagccagtcaggctccgcgacaatctcaataccggcgggcagggtagggccatcgttgagcgtgacgccagtacgaagcgcctgcagcgctgcattatccggtataccttctacctgaacatagtaaatcttgccggtgcgtttgcccggttgcgtgaggcgcgcctgcagcgcgccgtcattagtcagcaccaaaagcccttcgctgtcgcggtccaggcggcctgcggcataaacgccttgcacaggaataaaatcttttaacgtgcggcgacctgcttcatccgtgaactgcggcaacacatcgtaaggtttattgaacaaaaccacgcgttttggctggttttctttccgtgatttagatgcttgtcgtgagctgaatcgcttaacgtagtgatttctaaaagaagttttttgcatggtgttttcagaacttattaattgccgcattatagcgcaataatgagtgtctttcatggcggcaaacaatagggtagtattgacatgctcattacaaaacattaacaaaaaattgctctaacgcagtcgtgcagcaggacgccattgcacatgcagcgcgatgacagacgagcaaaccagaagcgctcgaaggagaggtgaatggaaagcaaagtagttgttccggtggaaggtaagaagatcaccctgcaaaacggcaaactcaacgttcctgagaatccgattatcccgtttattgaaggcgatggtatcggtgttgatgtcactccagccatgcttaaagtagtcgatgccgccgtcgagaaagcctataaaggcgagcgtaaaatttcctggatggaaatttacaccggagaaaaatccacacaggtttacggccaggatgtctggcttcccgctgaaacccttgatttaattcgtgactaccgcgtagcgattaaaggtccattgaccacgccggttggcggcggtatccgctctctgaacgttgccctgcgtcaggagcttgacctgtacgtttgtctgcgtcccgttcgttactatcagggcacgccaagtccggtgaaacatccggagctgaccgatatggtcatcttccgtgaaaactctgaagacatctacgccggaattgaatggaaagctgactctgcagacgctgagaaagtgatcaagttcctgcgcgaagagatgggcgtgaagaaaattcgcttcccggagcactgcggtatcggtatcaaaccgtgttctgaagaaggcactaaacgtctggttcgcgcggcgattgaatacgctattaccaacgatcgcgattccgtcacgctggtacataaaggcaatatcatgaagttcaccgaaggcgcgtttaaagactggggctaccagttggcgcgcgacgagttcggcggtgagcttattgacggcggtccgtggctgaaaattaagaacccgaacacgggtaaagagatcgtggttaaagacgttatcgccgatgcgttcctgcaacaaatcctgttgcgtccggcggaatacgacgttatcgcctgtatgaacctgaacggtgactatatttccgatgccctggcggctcaggttggcggtatcggtattgcaccgggtgcgaatatcggcgacgaatgcgcgttgtttgaagcgactcacgggactgcgccgaaatatgcgggccaggataaagtcaacccaggctccattattctgtctgcggagatgatgctgcgccacatgcagtggttcgaagccgcagacctgattgttaaaggtatggaaggcgcgattgccgcgaagaccgtgacctatgactttgaacgcctgatggaaggcgctaagctgctgaaatgtagtgagtttggtgacgcgattatcgcgaatatgtaataacgataattgttaaaaacaaaaacggggacttaacgtccccgtttttattattagtattcgaacggttatcaaaactttatcaaaactccctcaattcagaccgcaatagtagttcatcctttaccccgatcgtcatgataacctgagacccccctgaaagctgatagttaccgattttgattgtagtggttttcttaataatgtgtgatttggctattttttgaaagtgccttaccagatttattgttattatcaggagaattttttaataaaaagtgatggtttattgactacaatagtgggtaggttaagtattttataaaattattagcatgctttatttgctcttctacaaggctgctaagaagtgttgaaatatcagcctgataaagaatacgtcagcgaaagtgaatgctatattagtcataaaaattcaggagacatatgctcaaacctatctgccatagtggaagtataaaggttccggaatatctggaaacagataaggaaaaaaatgccggacgtactccactgtcttcagacattcagcaagttagaaatgttgttgaagatgttccgctatttccagaaagcagaacggcgagaggttctgtaagcgcagcgtacaggctttcttttgacgaagtgttttgcggtctcagcaatgaagagcgtaaaaaggtgtatggtcgcctttttggaaaacaagtacttgcgcatattcattccaggtgtcagcgcgacgctgacataataagagaaaaagcgctcaggcggataagccgtgagtgtggtgccgaaatagattgcgctctcttactaaataagatggtggatattttacaaaatgcccggctgacaataaattttaatgcagcaaaaattgactttgtctctctcttaaaaaataaagaatatctgaactcttatgcattaggttgcagaccgggagatttacctgcttataatgtcgggcgtgattcagttgaaactaaagcatttgaactggagaagcttgcagattcaccttatgccccatatggtcagacaggcggtttttccgtagcatatactcccaacagtagaacttttagcactacaagcagaccaatttatgctgcactggactttctgaacggtgaaaatggaggtgccagcgcctatgggaaatcattttttgaattaaatgataatgtaaaaacaaactgtacattctcaccttttgatatctacggccacagatttggcctggatacgagtaaattatctacattttggcatatggagaacctgattgcatcctgtcaaaatgatttttttggttataattgctttaagagtttggttaaaatggctaaggacgaaaaatttttagctcattctaattatggtaaaggctatgaagggaattatatagaggctcatattcatggtgatgtatgtttattcagagatataaaacacgtttatttgtctttgcaagaaaactcttactcgaaaagtcaactatatgattatgcaaaacaaataaaccaggcgcttaatagagactgcataatattatattgacaagcttattatcagtctctttaaaagagctttaaatgatcatgagcgcatacttcttgaggtaggcagtaactgcttttatatttattatctcaggaccgttctggcagatacctgtgtggcactttagtgtggtctggcaaaatagaggaatatggaccagcagaagcgcctgctggctgcttttcacttaaaatgctggacttcaccggtgcttcagatgaagcgaccttcacagtcatcaagtggcctgtattaccacaggagtgatttactggctatcgatattcctgctcatatcaatgacagtatttcgctctttcccgtacattgctctcccgaccagctcacggtccagtacatgacagtccttttccacttcgctacgcctaattttttttagttgctctgttttattgcgctgaatttgtacctcaaaacaataattttaaatacttatttgaatattttttttatgattttttcaagaaatgagtaaaaaaaatgaagaatgatataaataattaatgcaataaaaaatgatatcacaccaattgatggtcctgttttgtatacgaataacatgcataaaaatatagcaaatagatcaagggaaatatccgcgatgaaatcagtaattattttgaaaaaattcttcatattacctctttaaaatatctattttattcatcatttttaggtcgggcagtgctcgaaattcttacgtacaacgtatacgctccggtttctgcgcgctgcccggcttcacactggctccaacaagtacgcccgctggaatagattcctggcgtcacataacttcacctggttatccacaaaagactcaataaataaacatcttgagtacgaaaaattacagtgtcagagaatgaaatagcgattcgctgtcttcaagcagtgccttagtacctggcacgcgctctttcgcgctataatttttatcaatgtttgtatcgcctgctattttttaaatgtctgctgtatttcgttcatctttccagctgcttttttacgctgactttcaatgtcttttctcgattgttcaacaagttgctgtgctttttcggcttctttttttggggcgaaaggttctttgatctcatatccggcaatagaaccatccttatttaaggtcattaccgcacgtgctgtatttttagcagtgatggtaatgtcatagacgaattcgccattatgagctatctctgctcgtacaacgatatcgctatcttccgtaacggaaatgatgccactggcgttagcgcgtttaattgtttcctgaatacgctctggtataatgctgaaattgatcgagtcgaatttgaataaagcctcttttagtgcttcttgtttttgctcctctgttatagtgccaaagatggttaaattgacaggcgaaggtcccccccagtagccgttgttaaatttaaacacctctactttagcaggggtgttaacgctttgtcgaatgaatgaatacccgcccttgaagaaacggacttcaataatcgcaagattggctccaccttttgcgttgatattggcaatagctttttgcatttcggctttgtcgtaaaagaacattgattgctggtgctctttttgctggattttttgcatgtatttctcttgatttttttcagcttccgccatggcatctttatcgttatcacaggcgctaattagagttgccgcgatgaaggtaatcggaagtaagagatttttatatgtaacatgtattttattcatgtgaagtatttccctttttatataaaatagatagtcttgactggtcgagactatcctggaaacatagtaataatgcgtgtgcatatctgcagtaagttttagttatgctggttttatttcggatttttacctgttactttttgttcgtaaataggtattttacgtattgatgataagtttagaacctatcccagtaggcgtaatcgttaaagccagtttggcgaataaaagagtctaatgggataggctcttaataaacaacaaaaccaaacgtactttcagatttcaggctggaatgcgcacagctgattgttgataagggctactcataccgacaggccagtgaagcgatgaatgtcggttccacataccggtctgaggtatcaacaacaacatgttctgagtggtagcgtttgcgttatatcgtcacagacagcgcctcagggcgctgttttcgatcggacatgtcgctttcgcaggaggggacgttattcggcgaccagccacatatcagcctcttcaaacatctcttccagcatacggtgcagccgttctttctcggtttttgtacagtcactgtttaatgcgttcgcctgcattggcttaactttcacttgcgcatcgggaaaaagttgatgtacgcgttttgtgagttcattgaggatgatttcgcgtgcgcctggcaaaccttcaacatttcgcttgtcataaacgagttcgacgaacatcgccatttcctttttactggttggatgaccagtatttaagctgggtatataactggtgtcaaggtttagccgccgttttgtcatcctgacgttgcggacgtaaagtaaattgatcgcacgtggaagtaaaggtcgctaacctgttgtcgtgtcaagaggttagcggcactctcttcacagcggtgtcctgctacctgatggtaaattccagggcgcgactaaaatcgcaatcggccaacacaacagggtcgccttttctgacaataatgctatttgtgcccaggcattttcggctctgtttccccttaattttgttatcatcagtgagccagcgctggttatcattacccgtgcatgaataaagaatgattggtgtgccttcttttgtaccttgtcctgcggcatccagacatttctcaccctgcgtgattctgtctcggtgaaatgagaaaagctgagattgcacatgcttacactcccgcagcgtcaaacgattctgttgatctgggcctgcatcaaggcacagaccatcagttgtccgaatttgttccgcgtcatttatgtaataaccaccggaattaatctggttttgtgtaatgaccgggaacgacaaattaatactataaggtgtgggtaagccgttcgtcgtacatccacataaaatagaggagaggcagagaaccagtgtggtttttcctgaaagcaaagtcattcaattattaccctaaaaataaatagcgttacaactatattggcgatttatacccactgaatatgacgtagcattgagcggcaatagagataattccgatagaatcacataaatacttcggttaaatgcgcgcagccagccactcctgtgacaatgggtatatagcgttaaatacttttgcaatattagatgctatcacagtgaaaaacggctgtacatttcttcacgttaaacaaagtgagaagggggggcacccgatatatgataaaagaggtcacaggagtcattagcaaaataaatcttttagattttcgccactgaaaacattctgcagcctttcaggcaaagcctcatagcaggctgcggaggtagacgtactcgctaaatttttctgaaaaaatgccgggtgacgaattatgaaagataaacgttggcggcggtaggtccgcggaggccattaatacgacaaaactcaacgcgtataccggggataagcgcttctgtttcgtgttggcgacatgctgaaatgtggacctgaacatctttgcgtccatcggagggggtgatgagacctttaccgctcttacaatcaaaggttttgacaattcctgtcattttacgagacaaacaaattccttaatggggataacgaggcgcactatacacgtcaggaaaaataatgccagctatatttgatggcaatcaagatttccgggtggctaaaagtagtcgttcggcaccattgtagataaataacattatgttctggagaaagtattccctttcctggcgtcattgactggtgcggacatcatgggttttgtcgtcgggcaggacggtgaactaatctgcctggcttgctttttatcagtatttgtaggtggttgcggggttttactaccaaaatcgtagataaaaatatcccatgatgcctgttgtaaaccagaacaatggcctgaactggccaaaacatggaatgaaaaaataagtaatgaccaaagcataaaagcatgatgtttcatagcacctcctgttatatataatgacttgtgaagttcatctcctgaattatggaacgtcattgacattttttattcaacgaagagttaaccactcttaataataatgggttttatagcgaaatagacttttttatcgcgtgttcaatatttgcgttagttattatttttttggaatgtaaattctctctaaacacaggtgatatttatgttggaattgtggtgttgattctattcttataatataacaagaaatgttgtaactgatagatatattaaaagattaaatcggagcgggaataaagcgtgctaagcatcatcgtgaatatgattacagcgcctgcgatggcatataaccgtattgcggatggagcgtcacgtgaggactgtgaagcacaatgcgatatgttctgattatatggcgagtttgcttaatgacatgtttttagccgaacggtgtcaagtttcttaatgtggttgtgagattttctctttaaatatcaaaatgttgcatgggtgatttgttgttctatagtggctaaacactttatggtttctgttaaatatatatgcgtgagaaaaattagcattcaaatctataaaagttagatgacattgtagaaccggttacctaaatgagcgatagagtgcttcggtagtaaaaatatctttcaggaagtaaacacatcaggagcgatagcggtgaattattcgtggttttgtcgattcggcatagtggcgataactgaatgccggatcggtactgcaggtgtttaaacacaccgtaaataataagtagtattaaggagttgttatgaaaaatattattttatccactttagttattactacaagcgttttggttgtaaatgttgcacaggccgatactaacgccttttccgtggggtatgcacaaagtaaagttcaggatttcaaaaatatccgaggggtaaatgtgaaataccgttatgaggatgactctccggtaagttttatttcctcgctaagttacttatatggagacagacaggcttccgggtctgttgagcctgaaggtattcattaccatgacaagtttgaggtgaagtacggttctttaatggttgggccagcctatcgattgtctgacaatttttcgttatacgcgctggcgggtgtcggcacggtaaaggcgacatttaaagaacattccactcaggatggcgattctttttctaacaaaatttcctcaaggaaaacgggatttgcctggggcgcgggtgtacagatgaatccgctggagaatatcgtcgtcgatgttgggtatgaaggaagcaacatctcctctacaaaaataaacggcttcaacgtcggggttggataccgtttctgaaaagcataagctatgcggaaggttcgccttccgcaccgccagtcaataaaacagggcttctttaccagtgacacgtacctgcctgtcttttctctcttcgtcatactctcttcgtcatagtgacgctgtacataacatctcactagcataagcacagataaaggattgtggtaagcaatcaaggttgctcaggtaggtgataagcaggaaggaaaatctggtgtaaataacgccagatctcacaagattcactctgaaaaattttcctggaattaatcacaatgtcatcaagattttgtgaccgccttcgcatattgtacctgccgctgaacgactactgaaaagtagcaaggtatgtattttatccaggagagcaccttttttgcgcctggcagaagtccccagccgccactagctcagctggatagagcatcaacctcctaagttgatggtgcgaggttcgaggcctcggtggcggtccaatgtggttatcgtataatgttattacctcagtgtcaggctgatgatgtgggttcgactcccactgaccacttcagttttgaataagtattgtctcgcaaccctgttacagaataatttcatttattacgtgacaagatagtcatttataaaaaatgcacaaaaatgttattgtcttttattacttgtgagttgtagatttttcttatgcggtgaatccccctttgcggcggggcgtccagtcaaatagttaatgttcctcgcgaaccatattgactgtggtatggttcaccgggaggcacccggcaccgcaattttttataaaatgaaattcacaccctatggttcagagcggtgtctttttacatcaggtgggcaagcataatgcaggttaacttgaaagatacgatcaatagcagaaaccagtgatttcgtttatggcctggggatttaaccgcgccagagcgtatgcaagaccctggcgcggttggccggtgatcgttcaatagtgcgaatatgaatggttaccagccgctgcgaattctacctgggtcacttaataaagcaaaacatttaaacgctcaacaacgacaattcagacagttcgaacttttctttaaaaataggattaaccatgcttaaaagtggttactaattagccattatactacggtagtgattcacatattctttaacgttacgttacaggaaggttgaagtggaaatgcctgatgagtcttcaggcatttcttaaggttagttagctaaggaacagttactgagaacaggtttatcatcaccttccaccagttcagccgttttgcctttggtataaagtttataagtataatttttgtctatggcttcgtaatttgctccggaggccattttcattaaccgcatcgggatcatctcgtttacctgactgataatcgcataggcgtttccagcctcggtgttgacgtaaatcacctccataacctggttatcattacaggtgtatatagatttagaaatctcctgcgaagctgctatagaggtggtactggcgctaagcgcagcgagaaagagggtaaatgggatcaatttacgtttcatcattagtatcctttgtgcataaaattgtcgttaattccctgaagaacgggagataaagcggcatcaatacgatgaatgctgtagtattcctgtttactgacgaaaagtgcgccagaaaagcgtattataatttatccatcactgacatatgtgatgagtagacaaatcttaaaatcataaactataggctgcaaatcattatggtgcgatagaaaatgattgtcaccactgctcaatactatggcataaaaaccgaagaaaacggtactgttcactgtctcgtttcatacggtatctgtcagtgaaactatttcttcaaatgatggtctttttattatcgatcagataatggcatcaacaggggttattcaggagtatatgtgaaaaagtggcttataggagggatattgatcgcaagttttctgaccggttgtctgatgtggcacaacattgataaatggtttaataaagatatcgaatttttctacgtcggagacgatagctaaaattccagtcagttggcaacgggtgtcatatcttcaggtatggcgcccggagccgccgggcgcaaattgtaggtgtataaaagtcatttcattaaaattttagcgacaacatggacagtcactaccgcgtgctaacggccctctgaagtcacaagatgaataagccagttttttgtttcagcggtgactgaaacatattttgttcctggtggtcttaccgccagttgctgaaaaagacaacgataatgtaactgttgcagagactgacgaatacgacgaccgtgaattttatttttggcgaccatatttcctcccaaaaggccgcccgaaggcggcgctgggtttgataatggagaagggcgttggtcactgccataaccaacctgtatacattaatgcaattgataatcattatcaatttggctggtggagaaaaattgtaaagatgaagggacagcggaaatggcaatgaacgggatgagactttcgttaaccacttaaattcgtgactaaaaaaaggcttttatagacttgaaaatgtttttcccgtccctatgtagtcagtggacaagcaatgcttgccttgatgttgaacttttgaatagtgattcaggaggttaatgatggcactcagaaccttgtcagcacttcccgtgtttgctgattctcttttctctgaccgtttcaaccgtattgatagacttttcagtcaattaacaggagatacgccagtcgctgcgacgccagcttacgatctgcaaaagcgcgatgcgaataactatctgcttaccgtgagcgttcctggctggaaagaggaagagcttgaaattgaaacggttggcggcaacctgaatattacgggtaaacacactgaagagacggtagaggatcagacgcactggatttatcgtggtattcgtaaggcggatttccagttgagtttttctttgcctgaacatgctaaggtgaataatgcgaaactggaacagggcctcttgttggtcgagatttaccaggagatccctgaaagcgagaaaccgaaaaaaattgccatagaaagcaaaccaaaggcgattgaacacaaatcataatcgcgttaatggaggcccgtttagacgggccttcattgtctgtagcgaaaagtatcccgtcatgcttgtaggcacagatcgctaaatattatagccctgacctctatattatcccgtgccactgacctcgtcgccattggacggcggtaagttggaattatccgcgaggtcagtccaatttttgtccactctcgacattctgcctgttatgggcgcgatatctgaacataaattcgtatagcggttcatcgttttcaccgcgttgatgctatttctgctaacactactttcatacgtaaaaaagctgatgctttttaccttatttaatcgaggcaggtatgaaattagcgctcgtcaatcggcaggtcattttaccggaaagcggaaccgagtccttccagtgccatgcctctacgcttgttcgcttaccgtgcggtacgctcgtggccgcatggttcgcggggttgcgcgaaggaagcgaagatacagccatctggctatctcgctatgaacataatatctggacaacaccgcagcgagtggcggcacgcgagggggaagcgcactggaatccggtgttattttacccgtcggataaattgtggttattttataaagtaggcagcgacgtacacgtgtggaaaacctggtttatcacctccagcgatcgaggatttacctggagtacgccagctccgttggttaacgatgatattttgccgcgcggtcccgtaaaaaataaactcctgctggcatcaaatggcgcctggattgcgccagggtcgattgaaagtcctgaacggtggagggcatttgtggatcgatcctctgacgaaggaaaacactggagtatctcttttgtaccgctggagcctgataacgctatttccgggacaaacgtagcgttgtgggatggtataaaaaaggggaggttgtgggaatgttgtctggaaaacctcctgcgctgggatggcgttattcagcctacgctgtgggagtcttctccggggcatatccatatgttgttacgaagcacacgcggggcaatttttcgcagtgattcaatcgactatggcgctacctggtctgttgcccgcgcgacatctttaccgaataataatagtggtatcgatctggttagtatgcaggacggtacgctgattcttgcgttaaatccggtcaacggcaactggggaaagcgctatccgctttcactgattgcttcccaggataatggcgaatcatggctaccgctactggacctggaaagtgaccacggtgagtattcttatcccgctattattagcgagggcggcatcgtacatatcacctacacgtggaaccggaaaaatatcgtatattgtcgattacaaacggtataaggcgctatcagtcgaaaccgatagcgctggaataataatgccttgcccggcgtgctctctcacgccgggatggccgaaatagtcatgatttaccgggtaacatccttgaaaatgtatcgtctttttgtatgtaatggtgaaacaacgccgctgctgcatgcatggcaatcaggaaatagccgatattggccagcatttcatgaatacgctttatatccgattttagggtgctatctggcgtcaaaaataccggtacagtaaaaccaaaaaagctccagcttttcccgcctgacgccatcatcgcgacgcccagcagcggtaaggcgagaaaagtgagataaagcgcgatatgcattaatttagcggctacgtgctgccagtgaggagggggaggcgtaatgaccggatccgggtatttgtgtttaagatataaccgtaaaaacatcagcgcccagaccagaacgcccatatcatagtgcgtgtctttcataaacaggtaaacgctggagccttttggcgcccacccccgtaactcaatagcagcatatgcgatgcctgtcaggagcagtgttaaccagtgaagcgttatttgcagtcttgagaaatgtgccattattattatcctttattaacaactgcttgtagagtatgcgtaaaatcttaacagaaccttaaagcgggggctgagtcgcaaggaacagacagagatagcggcacgtaaaatgggataaaaagccggcggcatcgccggcttactgttgttattgtcctcttacgacaacacaggttttaccataaaacggatatgagcctgtagtttcataatcaacactcgacactaaagaaatatcgcccgcttttttcgctgaatcaatagatgcgtcgccggtatttacaatacccaataccgtttgcgcacacgctttaccggttttggttgccgggagactcgtggcagtaattggccctttaacatccgtatataagccaatccctgtcggtgatggtcctgtagcacaccccgttaaaagagaaccaataaagataattgaaaaaatgtgttttttatttgtcatgggattagtccattataaattaatagaaaacttaccgtccgaaaatgtccggacagtcatttaaaaagtggtgtatattaaatatgcgatattactctttgcaccctcctgttgatgtcgtacctgacggacaaatatccgttgaagccggatatattccccatgccgtgtttttataacttgtgcatcctgtcagcaatgagaacagtacggctaaaaaaatcatcacgagccctggcggcgttaacatttttcggttggactccatagcatgtcatttcatcgggttgccatatgactggcgttctgctggtaagtttcattaacgcccggttcgtttaatattggtttaggtttaaagccaggaggcgctaattacgataccttcttacgtttcagtactgactaataatgttgagaaaatgaacagcgtcgggtgggaagacgcaatacagaatagaagggaaataagagaataagatggcgttaattaacccggtattcctggcgtcatttcccttgcgttttatccccgtcaaaaacggcctttagctcacgttggcgctcccgacgtttgtgcgtatgatgtttttaaaagatcgtcatactttctgttctgcgtcaattttttcattacaaatgctcgccataatgccgtcctcaggaggtctcccgacgtttatgctgcgccgggagaaacaaaaacaacgcataatctgggacaaattgatgattaaaggcaaactggcgctcgtgacgtgcgcgctgactctggtattcacttcgtcgcttttcgccgcgtcggacacggcagacggtcgtaccctgaagctggccattggccctgagccaacggaaggctttgatcctatgctgggctggagccacggcagctacttattgcttcatgcgccgttgcttaagcaaaacgccgacatgagttggggtaatttactgacggaaaaagtggataccagccccgacggtaaaatctggacgctaaccttaaagcccgggctgaaattctccgatggctcgccattaactgccgaagatgtcgtttttacatacaataaagcggcgaagagcggtggtaaaattgacatgggcaattttagccatgcgcgagcgctggacgcacgccgaattgagatgacgctgagccatccgcagagcacctttgtgaatgtactcgggtcgttagggattgttccggccagccgttatgatgaaaaaacgttcgcccgcgaaccgataggcgccggtccgtaccgactggtcagctttcagccgggtcagcaactgatcgttgaagctaatccctggtatgcgggtaaaaagaatgactttaaccggctggtttttgtctttctggatgaagataatgcttatgccgccgcgcgcagcggacagttgggactggtgcgcattgccccttctatggcggtggccccgcagcaggataatcttaaactctgggtacgcgatagcgttgaaaaccggggcattgtcttcccgatggtgccagccggtaaaaaggatgctaacgattatcctgtcggcaacgatgtgaccgctgatgtcgctatcagacgcgcaattaactatgccattaatcgtaagcaactggcggaacaggtgatggaaggccatgcgatacccgcctatagcgcggtgcagggattaccgtggcaaaatccttcagtgatattcagcgatggcgatattgcaaaagcgcgcgccatcctggaagaggctggctggaaaataaacagtgcgggcgtgcgtgaaaaagcaggtaaagaagcgcgtctgaccttatggtatgccagtggcgacagcacccgacgggatctggccgaggcggtgcgcgccatgttgcagcctttaggcattgtcgtctcgttgcaatcgggaagctgggaaactgtagagcgccatatgcacgctaaccctacgctgtttggctggggaagtctggacccgatggaactcttccatcactacagcgggaaagccgctggtgtggaatattataacccgggctattacagcaaccctgcggtagaagcacatctgaaacaggctatagatgcgcctgactggcaaaaggcgattcctttctggcagcaggttgagtgggatggaaagcagggcgcgggcgtccagggcgatgcggcatgggcatggctgcttaatattcagcatacctatctggccaacccctgtattgatctgggaaaaggcgcgccagaaatccacggtagctggtcggtgttaaacaatcttgatgactggacctggacctgtcggtgatgaaattgttcttcagtcattttttgcggctgattattctgttggtgctggtggctgccggcaccttcattttgcttagcttttcgcccgttgatcctatccgtgcttatattggcaacgatctgctccatgttccgccagaacaatatgcgcggattgcggcgcgctgggggcttgaccagccgctgtgggagcgtttcggtcactggttttggcgtctgctccagggcgacatggggtattccatgctgttcaacatgcctgtcgccagtgtgatccgggaacgttttgcgacgtcattcgcgctgctggcaggcgcctggctattgtctggtgtgctgggcgtgacattgggttttctggccggacgttttctccaccgttggccggataagatgatttgccgtatcagctacttattgtcatcgttgcccactttctggatagccatgttgttgctggcgctgtttgccgtccgctggccggtattacctgtttgttgcgcctgggaccccggaaataatgcaggaacagctcttttatcggaacgtttacgccatcttgtgttgccggtatgtgcgttaagtctgttgggcatggggcaaattgcgctgcatacgcgagaaaaaatagccagtgtaatgaagagcgaatttattcgttttgcgcgcgctcagggggataaaggatggtcgctgttacgtcaccaggtgttacgtcatgcgattaccccagcactctgtttacagtttgcttctctgggcgaactgatggggggagcgttactggcagaaaaagtctttgcgtatccggggctgggacaggccactatcgatgccggcctgcgtggcgatgtcccgctactcatggggatcgttttattctgtacactattagtgtttgccggaaatacgatttcagcctggcttgtggtggtgcttaatcgatcgctggagcgtcccgatgctctataatcctgccccgacgttgtttcgtctgctcctctccgttacctgtctgctgtttattgccggatacggttatgccacgttgagccagccgccagaggttaatctgcttgcccggcatctgtcgcctgatatccagcactggtttggcaccgataatctggggcgtgatgtatggcttcgttgctttcagggggccttcaccagtttacaaattggcgttggcgccgcgctgtgcagcggcgttatcgcgttagtgatggcggcagtggcgcgcattcatccccggctggacctcctggtgcggctgataaccgatgctatgctcgccatgccgcatttacttttgctgatccttatctgttttacgctcggcggcggtaaaagcggcgtcattgcggccgtggcgttaacgcactggccccgtctggcgctgattctgcgcgccgacgcggagcgggtagcgcagagtgactacctgacattgacctatcgtctggggcatggacacctttattgctggcgatatcactattttccggcgctattgccgcaatggttgacgggaacgttattgatgtttcctcatgcggtattgcacagcgcggcgttaagttttctggggtttgggctggcgccgcatgagccttcgctggggctgttgctggcggatgcgttacggtttattagccatggaaactggtggctggtgctatttcccggcctaatgttattcacgctggtgatgctcttcgatcagtttgcgcgcgccattcagcggctgtggctaaggagtgacgtatgctgagtttacaacaggttacgctggaaagcgcgcgttatcgttggtatggcgcgagacgctggtcgccgttattacagaatgtctcttttgatatcgcgcccggcgaaatggtggcattggttggcggcagcggggagggcaaaagtctgctgctgcaatgcctgctcgatctgctgccggaaaatttacgctttcggggggagattacgcttgatggcaaccggctggacagacataccatcaggcagcttaggggcaatacgtttagctacgtgccgcagggggtacaggcgcttaatcccatgctgaatatcagaaaacatttgaacagagcatgtcatctgaccggacgcgcctgggatgagacgcaaatggtacagctattacagcaaagcgatcttgaaccgacagtcctggaacgctttccccgccagctctccggtgggatggctaaacgaattctggcgtgccacgcctcgcttagccaggcacgttatatcctcgcggatgagatcaccgcctggcttgataccgcactggcaaaccagttgctcgagcacttgcgaggcctctgcgagcggggatgcggcgtgctgtgggtgactcatgacctgctgctggcggcgcggtatgccgatcgcattgtggcgctgcatcagggttatatcacggacaatatccgctgcgagcagttacagccggaagagatgagtgaaccgttaaaacggcaatggcaagcattgcctgaactaaacccgttatttatgccgaccggagagggaatagaatgctgagctgccgcgacctcgttattcgtcagggcgggaaagtcttatggcagaacctgacgtttacgatttctgccggtgaacgggtaggaattcatgcgccaagcggaacggggaaaacaacgttggggcgcgtcctggccggatggcaaaagccgacggcgggcgacgttctgctggacggcagcccgttacccctgcatcagtattgtccggtacagcttgtcccccagcatcctgaactgacgtttaatccctggcgaagcgccggagacgctgtacgtgatgcctggcagcctgacccggaaacgatgaggcgtttgcatgtgcagcccgagtggctgacgcgtcggccaatgcagctctcaggcggggagttggcgcgtattgcgatactgcgcgcgcttgacccacgaacgcgttttctgattgccgacgaaatgacggcgcaactcgatccgtctattcaaaaagcgatatgggtatacgtgcttgaggtgtgccgcagccgttcattagggatgttggtgattagtcatcagtctgcgctacttgatcaagtctgtacccgccatttacaggtggaatagccgcaagtcgtttctccgcattgccgtgtcgccgttaacgcaccgggaacccatgggttcccggtattgtcggcagagattttactgcatgacgcgtttatctgcgttttttgcatcagcggtattactgtagtccctggtctcttcaacctgtacaggggctctgacaaccagactaggcagcgccagttcgatatcattctcaatgagtttttcaataatacggatatttatctcttgctgaatatccatgtatttattgtaatccgcggtattgacgatatgcaccacctcataggtcagccgatcctgaccaaaggccagtagatgggcgcggtcgaattgtgtttcgccgacatcggtaataatctttttcaccatatcgccgatgaggcgtaacttttccggcggtgtcgcagtggcgacgccaaaagtaaacacgatacgacgcgtttgcatccgcttatagttgtgtatggtttgctgcaacaactgcgcgttcgcacaaacgatctgttcgccgctgaggctacggatgcgagtggttttcaaaccgatatgttcaatcgtaccggctacatcattaaagacgacgaaatcgccgatctcgaagggcttatcgaaaccaatcgatagcgaagcgaagacatcgctcagaacggtttgtaccgccagggcaatagcaataccgcccacgccgaggcttgctaccagtgcggtaatatctacgccgacgttcgccaggatggagagcagcatcatagaccagacgagcacgcgcaaaatcataccaagaatgactaacgtcaccgggtttttattggagcctggggcatacagtaaatgacgcatccatgactgtacgccctgatcaagccaaatcgccatttgaatcgcaaccactaaaaaccaggcgtgagagagggtagagaataaccggtcaggcagggcgacaaagcgcaggctaaagagaaatgcggcaaaaaagattagcatcttactggtctttttcagcatctcgaaaacaataggacgcagccgcccatgagcatcatcctttttatccgggcgttgtagcgctttatagaccacattaagtagccagttgatgagccagtaagtaatgagggtgacgaaaaaaacgaccgccagattgatccagaacgtcgttgacatcagcatcgcaacgatatttagtcgtgctaaatactccattttacctccgatgaaaagcagatgaacattacagtatagacgtcacatcacggaggccgatttccggctttactattgctgttttattcagcacttttgttcaaaaagtatgaaaaagaggggtagccgtttggctatcccggcgtttctgtgcagacttatctactcctcttaataaaataaggagtcatttatgcaacaagaacatcgtcagtgtattgagcagtgttatgaatgcgcggcggcgtgtgatatctgcgcctcttcttgtctgcgtgaagataacgtcgaaatgatgaagcactgcatccagttagatatgcaatgtgcggccatttgtcgcctggcggcgcaatttatggcgttggaaagcgagtactcacaaaaattatgccgcctgtgcgcggatatctgcaaagcctgtgccgaagagtgtgcaaggcacgatcacgaccattgccagaattgcgcgcgggcatgcagccaatgcgcagacgcctgccttaaaatggccgcgtaatttttcttccgccattagctcaaccggatagagcatagagcttctacctctaaggttcggggttcaattcctcgatggcggaccagttgatatcaaaaaaggccacctgcgcggtggccgctgagtttctgttgaaataaatgcaatgttataatataacaatcatctttctaagaaagatgagggtaacgttttggtgattcatttaaaaaaactgacaatgcttctgggaatgctgttggtaaatagtcctgccttcgcgcatggtcatcatgctcatggcgcgccgatgacggaggttgagcaaaaagcggcagcgggcgtgtttgatgacgctaatgtacgcgatcgcgcgctcaccgactgggatggtatgtggcaatccgtctatccttatctggtcagcggcgagctggaccctgtcttcaggcaaaaggcgaagaaagacccggagaaaacgtttgaggatattaaagcgtattatcgcaaaggatacgtgacgaatgttgagacgatcggcattgaaaatggcgttatagaattccatcgcgacaataacgttgcatcctgtaaatacaattatgccggctataaaattctgacttacgcatcgggtaaaaaaggggtgcgctacctgttcgaatgtaaagatgcgaatagcaaagcgcctaaatatgttcagtttagcgatcatatcattgccccgcgcaaatcggcgcacttccatatctttatgggaaatacctcgcagcaggcattgttgcaagagatggaaaactggcctacctattatccttatcagttaaaggcgaatgaggtcgttgacgaaatgctacatcattaagtctgattgcaatgttaaaagctcgctatgaatagcgagctttttttctgccgttatgccatatttctggcaatcaatataaaaaatacctgcgcccccggagcgatgatgacgctgtccataccgccctcgattcaatgccaaacggaagcggcatgtcgcctgattactcgtgtcacaggcgatacgttgcgtgctattcatttatatggttccgctgtcgcgggcggtctgaagccaaacagcgacattgatctgctggtgacaatatgccagccgctgacggaggcccaacgcgcaacgctgatgcaggaattgctggcgctttcatcgccgccgggggcgtcggcagaaaaacgcgctctggaggtcactgtcgtgctttattcgcagctggttccctggtgttttccaccttccagggaaatgcaatttggcgagtggctaagagaggacatttgtcaggggatttatgaaccagcgcagcaggactgggacatggtgttactgataacccaaattctggaaaccagtataccgctaaagggagaacgcgcggaacggctgttcacgccagcccctgcggcgcagttgctgaaggccttgcgttatcccctcgacctttggcaatccacggcagatgtgcagggagatgagtatcatatcgttttaaccctggcgcgtatctggtataccctttctaccgggagatttacctctaaggatgcggcggctgactggctgttacctcagttgccagaagattatgctgccacgttgcgtgcggcgcagcgtgaatatttaggtctggagcaacaggactggcatattttgctgcctgcggtcgtacgctttgtggattttgccaaagcgcacatccccacgcagttcacataagatgccccaggacgtctgtcaggttgcgcaaacggcgttcctcaactactacttaataggttctcatcgctgaagtaagcagatgatcttatgcgggccatcgaatggatattcccacatggctctcgttttgttgaggtggatatgactggttccgcatcatctgttttaaagacagatacaagactattgagcgaaaacctgtttcttaattatggtctggagtccttatttaaggacgtcgcaataatagctggcaacgtaaattatattatttttgatatcgacgattactacaccgtacagcagtatattacttccacatttaaaacggtactcattggaattgttacccataatgaatataactttattgatgaacatcatgtcatatatcgaataaaggtcgatgcctctattgctgagtggcgcgaattactgattttggccgctgctggtcaattttttcccaggtcagagaaagtcagattaacggcgaatgaaagaaatgttttggcgatgcttgttaaaggaatggatatccgacaaataagctgtgagctgaatgtacatttaaaaactatttactcagtacgctaccatgttctgactaaattaggttgtagaacagttctggattatcaaatactgtccgtttctaaagcctttacgcactggcttacaataaataatgttgataatgtaatttcccgtgtaaatagtaaggtcattgcttaataatgatttgcttctgatggcgtttaggttcactatgctttcttacatcatcatgaggccagacaggcatggctacttttagtattagcgcaatggcggcgcagtgtggtgtcacaacagcaaatatcaggtcctgggaacgctatggcctgcttcaacctaccaaagatgaagctggcaatcgtttttattgcatagaagatgctatcagaatacagcatattatcgacgcgttaagcaaaggcttttcattaaaagagattaaacctgccctctatggtgaagaaacgcattgccgctcgggatggttattctaccaggaagagattttagcgcagtgtagaaaattcgaacccgccaaattgcgaaaattactctggcgttatggtcgggaaattccgccgtgtatcgtcattgagtcaatactgcgtcctttacggctgtggttgtccgcaggcgatgatgatgcacgccgatttgaaaaggcattactggatactgcgattattgaatacgccacgttccagctaagtagcgtacgaaaggcgccagcaggcacaatgcttattgctgcgttttcgctgaacgaccccattgagctatggctggaaacgattaaatattgtagtgaaggtatgcgagttgaagtcatcccctggcaggcgccgatgcccgatcttttatcaacgtctttcgagcatattgttctgtggcatgatgagacattaactcccgcgcaggaaaatcttattcaggctttaaaagaatcgggtaaatttagtcttcatgtgaaaaatggctcaggcttaacattactgccagccgtatatcggcagcatgagatgccagaaagcatgcagcatgttgcaccgcaaatccatgcaaacggctacgaaaaatcaggcaccgcacgttgaggcatctgcattattaacgaacaggggaggagtaaacccctcccttgtttatactcttcatacttcaagttgcttatgtgttggctacggattactcggcccatccatgggcctcgccctgacgggccgtcgcacgcgacgttcaaatctgctcccggcagatttgtcgttcaccccagtcatatagttatctatgcttctggggactcactcccttgccgcctttaagcaactcgaattattttgggtatatattagatgtcgtcaggtgtctgaaacaaaacggcttctaaggcattacggtaaatatcaagctgcactacgtctttttctgtttccagtttttcaataagtttggcgatgacatccttatttgagacatgctgctgcgattgcaatagttcgtaagtaatttcctgaatagctcgctgttcacataacatatgtgcagaaaaaggattgccagtactattttgttcgttgactagtgtaatggtagtcatatttcaccatattcgatgtaaattgaagccgatctccctgagcgggggagagaaattagtgacctattaaagttagacctatatcataaaactgtaataaaaaatcataaaaacgtgatgcgcatcacatttgtgtgatttgttgtatattttatacactttaaatgaagattccgcagaatcaacggcctgttcttttttctcactccagtttaaacgaataagcattaatacccatctgtaataattacttaatgttatcttaataaaggtaaattactgtcaggcctccgtaaaaggaggttgattaatgattcgtcatatcgccatttttctttgttctttattgatgtgcagcaccacttttgccgattcggtaacgtcggtatcgcttggcgcgctcttaaccgcgctcaatgaacgcatgttattaatgaaagatgtggctgcttataaaatgaagcaccatctgccgatagaggatttcacacgtgaacaaaatgtttttgccgaggctgaagaagaagcgaaaaataacggtctggacccgcattcgataaccccttttattcgttcgctaatggatgccagtaaagcgatacagtaccgctatttagcgcagtggcgaaccggctcagaaccctcctttccgatacaaaccttgtcggtcacccggcaacgtattcgacaacttgataatcaaatgttgatcattatcagccagcgcttgatggtcggcgctttcagccacgacgatatggtgtggctgagagcgcagtttaatgcgccgaatctgaatgagagcgatatcagtaatgtgttggcagccttatctttggtgcgacgcgcgcgttaactccacatgaggagaggtgggccaatacctggtgattgcctgcggaggtagcgataaaagaacgcttttaggtgatttggatataagcgtggcggaatagcggctggagagacgtggtttcgcttcccatcttccggtgcattcgttagcatactgtttcgcagctaagcgtaaatgttttcaggaagaggttaatgtgttcgcggagtatggtgttctgaattattggacgtacctggttggggcgatttttatcgttctggtaccggggccgaatacgctttttgtgcttaaaaacagcgtgggacgcggggttaaaggaggatatcttgccgcatgcggcgtgtttatcggcgatgcgatattaatgtttctggcgtatgcgggcgtggcgacgctgatcaaaacaacgccggttctgtttaacattgttcgctatctcggcgcgttttatctgctctaccttggcgcaaaaatcctttacgccacgctgacctcaaaagggcgtgcggcgacggaaacggtagttccttttggcgctatttttaagcgtgctttaattcttagcctgacgaatcctaaagccattacttttttatgtttccttttttgtgcaatttattgacgttactgcgccgcatactggggtgtcattttttattttggccaccacccttgaaatcgtcagtttttgctatctgagctttttaattctttctggcgcttttgtaacccactatattggtaccaaaaagaaactggcaaaagtgggcaattctttgattggccttcttttcgtcggatttgccgcccggctggcaacgctccagtcttaaccacctggacccgtcgtcaacggcgggtcattgctctcctttcggttttattgcgtggaaaacagcaaaatagtaaccaataaatggtatttaaaatactgtttttggagcgtaacctttttacgacagcgatgagattatcgctgagtaacctgcgtgaagagggaagcaaatgcggcaaattccacaaaatcatattcatacacgttccacgccattctggaacaaagagacggcgcctgccggaattttcgaacgccaccttgataagggaacgcgacccggcgtttatcctcgtctctcggtgatgcagggggcggtcaaatatctcggatacgctgatgaacattgctctgagccggaagagatcatggtgatcaatgccggcgagtttggcgtgtttcctccggaaaagtggcacaatattgaggtcatgacggatgatacctattttaacatcgactttttgtcgcgccggaagtactgatggaaggggcgacctcacgaaaagtcattcatgccgggagagaataataatgggaaaagctacttataccgtcacggtcacgaataatagcaacggcgtctctgtggactatgaaacggaagcaccgatgacgttgctggtacctgaagttgcagcagaagttgtgaaggatttggtcaataccgtgcgttcctacgataccgaaaacgaacacgacgtttgcggttggtaaggatcttgtagtatctatttgatataaagtgattttttaaatcagaagccgcatcgcgcgtcgccagcgtgatgcggtttttgcgtattgaaaagcgctgtttatttacatcagacatgggttgaaaagaaacattaagaaaacattaagaatatcgcattgtttgctaatgagagcgtattcataaaacttatgattgggtattaaaaaccagaagagtcttataatcatgaaactcgatacccgattaacttcgtcagcacttactcttgcgcttgccgctgtggtcatcccgtttacggcggactggcaattgcctttgcttaacggcgtggtggtccgatggattgaaaacggacaagcgttatggttactgtttggggcgctatttaccgcctggtatatacggccactttcccgtcccgaaggggcaaagcagttttggctatgggctgttgtctggtgggtggtgctattgggtagaagcaccagttgggggcgtgactatttccctgacgagccgcgtatgctgttcagaacgatttcagtgatattaattgctgcgttagtcttgccagtcctgttttctgccgggctacgtaaggagattgttcgtcgcctacgggacgttcctctgccattgtggctgtttgccgtgacgacatgttcatatctgatttccgacactgtcgagcatcatcggtggttgtcgccgatattcctgcataacgctcgttacacggatttgattgaagagctttatgaagtgccatttatgatcggtttgtttatggtgaccgtggggtttatgcagcaggacaagcaggatgaatgtacggcgctggagatgaccccgtatcacgcaaaatagcgcggctgaaaaaagaccatgaattcgacatgggatagatagcggttagcaaaaaaagcccgcactcggtgaggcgggcaaataatactggaagcaatgtgagcaatgtcgtaccgaacaggtgggttataaactcaaccactcggtattgataaagataatcgttatcattaatgattgcaaccctgatatttatgcgcttttatccacgacgctaaaaggtgatggacatcacaaacttcactttcctgacgatgtgctattctttttaacggcaaataaaccgctaacgttaagacataagtgaggaaaaaatgggcattctttcatggattatttttggacttattgcgggtattttggctaagtggatcatgccaggtaaagatggcggcggattctttatgacgatcattctggggatcgttggtgcggtagtcggaggatggatcagtacgttctttggctttggcaaagtggatggtttcaacttcggcagctttgcagtcgcggtgatcggcgcgattgtcgtgctgttaatctacagaaaaatcaaaagctaaacgcagaactttcagagataataaaggctacgacaggtagcctttattattcaaaatgaatttaccaccagcccagttcggtacccgccaccgcaattagcgcgatgcccatcaacaccatcgttgttttcctcatggttatgctcccggcgcggcgtaaccgccaataaaaaaccatgccaaaaataatattgccgtaatgaaaatgacgacagggaagaggatacccactctcatgctattaccttcactgttcagggggcgccagaatagcagggttttctcagcgacaaaaggttggttgctttgtgacagggcgtggctattgctgacttaacccgggataaacacccactaaagcgctgacagaaagtatggaaatagcgtacccgccaggttatcctggacaaaatatcgctttaaggagtcgttatgaaatttacgtggattgcgttgccaggcgtattgctgctgagcgcttgttcatcgtcgcaacccaacgcccccaggccgccgcgtattgggatgcctaatccggcagccgtctactgtgagcaacagggcggtacgctgatgccggtgcagaccccacaaggcgtgcgttccgattgcaaattgcccaatggcgaaatcattgatgagtggacattatggcgcagagagcaccctgatacgaaaaagtgacaacctgcggtccgacgggatatgattaagaacaatctgataatgagtttcatgcggcgcaagaaaatatgtttcagttaaagccgggcgcgttggcaatagttattggcgctaaaacacccgccggacggcagaatattggtaaatcggttgagctattttgcctgtgccaacccggagatgaattcattaatccagtaaatggacacgtcaccttactgccgaaagaagcgcctcgggcgctgtggctggttacgggcgacgtagcctccgccgatggccagcacggttttgcctgggtgcgggcagaacatttgatgccgttgtccccggacagacaaccaggccaggcggcggcacgacaatcacagctctcgtagccactctgccagcacaatggcatggttctggcgagtatctttagcggcgtatagcaacgttagcggctggtgtcgggcaatatccgccagacgtttgccttcttgatgctgttgcgcaagttctgcccggtattgctgcgcgaagtggttaaaatcaatcagttcgctatgaaaggctttgcgcaattcggtggagggcgtaatggccttattccattcatcatagaccagcgctgcttttttaatgcctcgcggccatagcctgtcaaccaatacccgataaccatcgtctttttccgccgggaaatagacgcgcttacactggattcgcatttttccctcctgtgatggtgtcgcttacggtacttttgtcggatagcggtaatgattttaatggatcaggcctgataaacgaagcgtcatcaggcattcaagtgggtatcaggtttatttatgacgctatctctcgatcgcgtccggcgtagaggccgaaaatcgccatgatgatagccagaaccgtcacgcctgacagcggtagataccagctaccgctggcatcatgaagttttcccatgacgggcggcccacatgccgccagtaaatacccgaccgactgcgccatgccggaaagcgccgccgcctgatgcgccgaactggcgcgcaggccgataaacgtcaggccgaggatcatcgtcgcgcctgaaccgaagccgaacagtagcgtccagatgatcgcctggcccggcacaaaccaaagccccgccgcgcccactgcgcacaatagtgagaccagcgcggcaatccagcgttgatcgttaaagcgatgcaaaataagcggaatagctaacccaggcgccgcggtcgccagttgcagcaggccatgtagcgatcctgcctgtgcttcgctgtaaccgtggctgatgagtattgttggtaaccagccgataatcacataataaatcagtgagttaagtcccagaaacaacgtaacttgccaggctaaaggcgaacgccagataccgcgttcatgtaatgcccgggagctactcaggttagctgagcgggtagtgcgccactgcggcaaccagataagaaacgccaacagcggaaacagcatcagcattaacagcgcgccgcgccagccaaaaccgtgcaacgccagcggaaccaccagcgcggaccccaacgcggcggcggcgcccatcgtcaatgaatacgcgcccgtcagcctggcgacatgttgtgaaaaatcgcgcttaatcaatcctggtagcagcacattacccagcgctatcccgcacccaataatggcagttccggcaaacaacaatgcagcggagggcagggagcggagagcaatacccgcgcaaatcagcagcattgcggcaaacagactgcgttccatcccaaaccggcgggcaataccggccgccagcggcgaaaccagtgcaaacgccagaagcggcaaggttgttagcaggcccgtctgggcggtggaaagaccgtaatccgaacggattgtctccagcaacggcgcagcgccggtaaatgttacgcgcagcgtagtggctatcatcaaaataccggcaatcagtaaagcgccctgtttgccgcgtggtgaaagggctgtcgtcatcgttttctcatctcgtcaggcgaggcgataccttaacagtttttactgtttggatgaatcaagctaaaatgacaatttatcgctaaaatcggacaatataatgattggtctgagactggacggttacgatcccgaccttcaccacgatgccgctgtggccttttgtattcgcgccagggatgatgaactgtttagccctcgccatcagcatcgcaagggacagttgattctcgctctgcacggcgcgattacctgcgaggtggaaaatgcgatgtggatggttccgccccagtatgccgtctggctccccggctcgctgccgcacagtaatcatgtgaccgcaggggcggagctgtgctttttatttattgaacctgcggcggtcgtcatgccggagcgttgctgcacgctgaaaatttcgccgttatgccgggagttgattttgtcgctggcgcgcagaaccgatcccgaaagagcgcaaatgccaacgcagcgccttattcaggtgttgtttgatgaactgccgcagcagccgcaggaacaattgcaattaccggtatcggggcatccgaaaatccgccaaatggttgagacaatggcgcaggagcccgcgcgatggaatacattagggcagtgggccagcgtattcgcgatgagcgagcgtaaccttgcccggctggtcgtcaaagagacgggactaagctttcgtcgctggcgtcatcagttgcaattaatcctggcgctacaagcgctgatcgcgggacgtaatgtacagcagacggcgcaaatgctgggttatgattccaccacggcattcattaccatgtttaaaaaaggcctggggcagacgccaggccagtatctgacgggcgagttactgcttccccacaattaaagagaccagccccgccgcaatcagtgggccgaccggcacgccgcgaaacagcgcgacgccaagtaccgtaccgaccagcagcccggcgacgagctgcggttggtttcccatcagcgtaatgccgcgaccgcccagccaggagacgaaaacgccgacggcaatcgcgaccagcgatttccagttcacaaaagagtggatcaatgtggagggcggtagggttccgctggcgatgggagccattacgccgatggtcagaatgataatcccgacggtgagtccctgtttttcaatccagggaaaaaaggtattcaacggggttacgcggacaataatcagcaccagaattgagacggcgacagtggtgttgtggctgataaatcccagagctgccagtccgagcaggatcagcagagtgacatcaaacattatggtttccttgccaaaaagtaagcctgactactttacgcccaaacggcaaagcgcacaggcctttttaacgattgatgcggatttcaggcaactgcctgaaagacaatctctacgtgaaaaacggcgttgtcattaaattgccatcaacgccgcgtattgctaacaggtgaaccgtcattgttgtcttcctgaggatacaattatgtacgatccaccgtttcttgaagcgctgatgattacggcgtcgtttttcgccatttttatcattatcgttgtgtcggtattgctccttgaagggggaggggactaagccgttggcgatgactgaaagcggcggaagactgccagttctggtcgggcgatgcgcagatagtcctgtgtattcataatgactgatttttccagcaggccggcattaaaggcaatttcatcgaaacgctcaaacaggagcggatcggcgaccagtttcagattggggtgaaaactgaaaggcgggatcgcgccaaaaacgcagccggtcagcatatcgacttccgccgggctggcaagggaagcgcgtaagccgcccagatgtgaagcaagctgagagaggtcggcttgctgatcggccgccagaatagcaagaacgtgctggttgacgccgttgcctttgactttacagaccagcgcttttgcgccctggcccagcgcagtaccacgtatttcagataccgcttcgcatttccctaccgcttcatggttcaccacacgatagcgcgcgttctcctgggttaataaagccactaaacgttggtgtgtagcgacacccttcgcgacttcagtcatttcggccatttctcactcctggtgcaatatgaacatttactgcgaagcactatgatgaacgatgttgtttttgttgtttgttcagatagagctgcgcatcggaagcctggtaggcatcattaatcgtatcattgggctgcatattataaatcccggcagaaaaatggactgtcttatccggtgcgataatttgcaggttacgaataatacgctccggcagatggatagccaaatccgccgcgtaatcaacaagaataatacagaactcatcgccgccgaggcgaatggcgtaatcgcttttacgaatcgatgttttaatcgctttcgccaacagggttataattcggtcgccttcctggtgcccctgggtatcgttgatcagttttaacctatcgcaatcaatagcgacaaatgtcaccggcgtcccggtattgaccaggcgttgcagtcgctgttccagcaccggtgttaatattttacggttgtaaagcccggtcatggcatcgctaatattttcgcgtgtgacgttgcgataaagccgaaagtgcatccgtaccatattaagcaggagcgccgttgccagtaagtaaaaggccagcgctttccaggacgagacaaggaaataggttaaatcaagggacaacgaaacgcgcagcccaccagggatatcatggctataattcacatattgaaacagattatttttgctttgattaataataatttcttttccggagtccatatcctttagtgttacgttaagataacgccaaaccagcggacggtcctgggtataaaaaatattttttaaattatcctggttaacatccaccatcacgatgccttttaacgatcccgccagatagactggcgttaaaaaactcatgacgttttcctgagtaatatcatccatgtagatacttgaaataaccgtacggccggtaaaaagtttatctatatcttttctgttaatacccattgtgcctttttgtaaaaaagtccaacgatgcatggcgaagcgccgtgagttgattaaatcatagaaatagacataatgtttatttaaatcaacgtaataacggaatttaagctccagtgtgcccagcccgtgactatggtcgtcctgcgaacggttgatgcttaccgcctgatcaaatgcaggcagtaaaagggcgtcatcaagattatcggtacactgtgtagcggcggtttgcagagtaccatgtagcgccggataattatgccgggtcaggttgacaccgtgcgtaccgttaatagcttcaaaggcgtcgcaaaacgcgcggtgtttttctgcggtgacggggtctcccggcgcttcaaaagttcgcatcaaatgtgcggcgatgctctgattctggtacttatcgtacaaaaacgacgaatcggctctctccatgatataacgcatataggcattcattgccctgtcgctggcaataagttcgtaaatcaggaaggacgatgtcaaaacgatgacgcttgccgagataaagtgcctgagcgctttatgatgcaaattcatgatgaactacagccctgaaagtcggatgcgttagtttaccatagcgatgagaattcctctaatagactgtttaaaaataaaacgtgttgatgttatggaataaaaatcattctcgatttaataaattcaataatatatggtgttgatattttcagtcgtgactattgtcgcaaaaagtaaattgttaattaacggcatcgatttaacactaacgaaaataaaatagcctttattattacgcgaaaggagtgtgaagtggtaaggataataatgtacttccgttcggaggcactatgaaacgatttaaagaaatggcaacaatttttctttttgtcattgctggctgcggggttcacgtcgtctgctatggcagcgtcgggtagtgatagtccgtgggattttgattttttcgggtccatggcttttttgcaaactacaaccccctgattctctgcaattaccgccacctcctggtgagtattgctggcattaataaatccatagtatttcagtgataagtcggcgcatgtaaggttaatccagtcaggagatatacaggtttacggctattatagtggtagtatgtataattgccttgttagtgataaatcagcccgtgactcattacgggctgatttatggttatgcactttgattggcgctctgtttctgaaacaattcgcggaataccggataaatatcctcctgatcgcgaatatgctgcatggcgaagttatcgaacgtcgcctgcagatgttcatactcgcgccataaggtctggtgggcgcggcgggtaatctcgatatagctgtaatagcgcactaccggcagcagctttttcgccagaatctcatgacacagcggtgaatcgtcggcccagttatcaccgtctgacgcttgcgccgcatagatgttccactgaccggggtcgtagcgctctttaaccacttcgtccatgagtttaagcgcgctggagacaatcgtcccgccggtctcttgcgaataaaagaactcatgttcgtccacttccttcgcctgggtatggtggcggatataaaccacttcgacgttcttatacgttcggctcaaaaacagatagagcagaatgtaaaaacgcttggccatatctttggttgcctggtccatcgaacccgagacgtccatcagacagaacatcaccgcctggctggagggctcaggccgtttttcataatttttatagcgtaaatcaaaggtgtcgataaacggcactcgctcgattttagcccgtagttcggcaatctcccgacgtaaccgctcctcttcaagcagttgcgctggttcgctgtggctgatggtctccagttccgtttccagcgcgtgcagttcgcggcgttttcctgccgtcattgctgtacggcgcgccagagagttttgtagcgaacgtaccacgctgatattggccggtacgccgtttgaggtgaaaccggcgcggtgagttttatactcgttaagctggcgatgctggtttttcttcagattaggcagcgctaaatcttcaaagagcagatccagatactcatcttttgaaatctgaaaaacaaactcatcctggccttcgccgtcctggctggcctgaccttgaccgctgccggaaccgccgccgccaccgccttgcggacgctcaatgcgatcattctggataaagtgatcgttacccggatggacgcgatggcgcagaccgccgcgcccctgatgaaacatcggttcgctaatatcatcggttggaatagagacggactctccgctgtcgacatcggtcacagagcgtttattaatcgcttcggaaatcgactgcttaatttgtgctttataacgacgcaaaaagcgctggcgattcaccgtgcttttatttttgccgttaagacgtcggtctatgaaccaggtcatatgccccccgtactgccaactgagcgcctgttctgtcagtgccggatagcgctaacgcttagccagtctacagaacattactttgtaggcccggtaagcgcaagcgccaccgggcattaacatcacgacgatttacgcacgcgcaggtaccactcgcacagcaaacgaacctgtttacgggtataccctttttccatcatccgatcgacaaagtcgtcatgctttttctgctcgtcagtcgacgttttggcgttaaaagaaatgaccggcaacagctcttcagtattggagaacatttttttctcaatcaccgtgcgcagcttctcgtaactggtccagtttggattacggccgctattgttggctctggcgcgcaggacaaagtttactatctcattacggaaatctttcgggttactgatacccgctggtttttcaattttttccagttcggcgttcagcgactcgcgatcgaacagttgaccggtatccgggtcgcgatactcctgatcctgaatccagaaatccgcataagtcacgtaacgatcaaaaatgttctgcccgtactcagagtaagattcgagataggccgtctggatctccttgccgataaattcggcgtatttcgggatcaggtagcctttcaggaactccagataacgctcagcctgctcctgcgggaactgctcgcgctcgatttgttgttccagaacgtagaacagatgtaccgggtttgccgccacttccgcatggtcgaagttgaatacgcgggagaggatcttaaaggcgaatcgggtggagagaccgttcatcccttcatccacgcccgcatagtcgcgatactcctggtacgatttggctttagggtcggtatctttcaggctttcaccgtcataaacgcgcattttcgagtaaatactggaattttccggctctttcaggcgggaaagaatcgagaaacgcgaaagcgtttccaacgtgcccggcgcgcagggcgcatgagccagctcgctatgattaagcagtttctcgtagattttgatctcttcggagattcgcaggcaataaggcaccttcacaatatagacacggtcgaggaacgcttcgttatttttattgttacggaaagtcacccattcagattcgtttgagtgggcaagtatgatgccattaaagggcagggcggaaataccttccgtaccattgtagttaccttcctgggttgcggtcagcaaggggtgcagcaccttaataggcgctttaaacatctcgacgaactccatgatcccctggttagcgcggcacagcgcgccagagtaaccatacgcatccggatcgttctgggcgtgatgttcgagtttacgaatatccaccttgccgaccagcgccgaaatatcctggttgttttcatcgccgggttccgttttggcgatggcaatctgctccagaatggagggccagactttcaccacgcggaatttagtaatatcgccaccaaactcatgcaggcgtttggccgcccacggggacataatcgtaccgagatagcggcgcggaataccgtactctttttccagaatctgcgcgtcttcctgcggattaaacaggcataacggatgatcgttgaccggactacgctcgccgttggcgcttaaaacataaattggcacgcgctgcattagcgatttcagccgttcagcgagcgatgatttgcccccccccacaggtcccagcaaatagagaatttgcttcttctcttccagcccttgcgccgcatgttttagataagagacaatctgttcaatcgcgtcttccatgccgtaaaactcttcaaacgcaggatagcgagcaataacccggttggagaagagtcgggaaagtcggggttcctgggcagtgtcgaccatattaggctcgccgatagccattaatagccgctctgccgcgttggcataagcactgcgatcttgccgacaaatggtaagaaaatcctgcagtgtgaactcttcgtccttggcagcttcgtaacgctggcgatagtgatcgaatatattcatgatatgccatcctttcgttttttcgcacatgttaagagccgttcatatgaatagtagaggctcccggaagaggtagactgaacgccgtctctgctaaggaaaaaaagcaactctcatgccattttattggtcagaagattaacgtgtccggtgatacaccttcttaacattaagcgtagatggcatttgcaaaacttgcctgtacgcgtcagtggatttcgatgacatatcaataactcatcaggtagaaaaggctggtggatatcagaaaaagcgttcccggtcacataacgatcatcagccgatcatctgaaaataatcggttgtggtgatattaaacggttacattgtgtaaaatagttgggcttacaggtattggcggttacacttttgccgcagaacatttgaataaggaattatggattgtgaccaaacttaaacttctggctcttggcgtgtttattgcaacatccgccagcgtcgcgcacgctgaaagcaacctgacgttgggcgcaggcgttggtgtggttgaacacccttataaagattacgatagcgatgtttatccgataccggtcatcgcttatgaaagcgaaaacttctggttccgtggtctgggcggcgggtactacttgtggaatgacaatgccgataagttgtcaatcatggcatactggtccccgatgtacttcaaaccgggcgacagcgatgaccatcagttgcgtcgtctggacaggcgtaaaagtactatgatggcgggcgtttcttacgcgcatcacacccaatatggattcctgcgtacctcactggcaggggatacgttggataacagtaacggtattgtctgggatctggcctggctgtatcggtataccaatggcgggctgaccttaacgccaggtatcggggttgaatggaatagcgagaaccagaacgattactattacggcgtatcacgtaaagaatcttcgcgtagcggcctgcgcggctataacccgaacgatagctggaacccgtatcttgaacttagcgctaactataatttcgccggtaactggagcgtatatggtactgcgcgctacacccgcctgtcggatgaaattaccgacagcccgatggtggataaatcctggaccggtatcctttctactggcgtgacctatagattctgattgattgaatttgccggaaaaaccacgacaaagcctgcgttatgcgggctttgtgctgtctgaaacgcgaacatgacggcttgcataaatgcgctgttgaccgggtatggcgcagccttatgtgatttatactttgttacatcaatttaaaaaactagccttttatatgaaaaatccaggtgattacaactgcgctaacaattagcgtaataattgttgcaatgctggctgatatcgccctgtcacgtcccgcttatgctatacccattcttcacagcgagtaagacgaatgagcatagtattcaataccgtagccaagcccagcggcagtctgtgtaacttatcctgcaagtactgtttctatcttgataaaccccgggggcagcgcgtcatgtctgacgatgtgctggagacgtatatccgccgggtaattgatgatacgccatcctcagaggtctcgttttgctggcaggggggagagccgacgctatgcggtctttctttttaccaaaaagtggtgcgcttgcagcaacgctatgccaacggcaaaactatctacaacagtctgcaaaccaatggcgtattaatcaatgaagagtgggcggctttctttgcgcagcaccagttcctgattggtatatcgattgatgggccgcaagtcgttcatgataattaccggaaaacgccgtcagggcgggcgtctttttcccgagtcgttaatgctatccgccttctgcaggcaaatgatgtcgagttcaacacgctcactgtcgtgaatgatgcgtcatgctgtcatggcaacgctatttatcattttttgacgcaggaactggaaagtaaacacctgcaatttattcccattgttgagccgctcgcgcaaaaagcgcagcgttctttgacgttatctgacaatgaggattcgccttcgctgatgcccttttccgtcacgcctgaagggtggggcgcctttatgtgcgatgtttttgatcaatggatacgtcacgatgtcggacgcatattcgtacagctttttgataacttacttggcgtctggatgggggagcccgccacgctttgtacgatgcagtcgacctgcggacaaagtttgctggtggagcagaatggcgacgtgtttagctgcgaccattttgtttttcccgcctataaactgggcaatctgcagcaacactctttagaagaaatggcggcctctccttttcagcagcagtttggcgcggctaaagcaaacctttcctcacgctgccagaactgtacgtggcgctttgcctgtcacggcggttgtccgaaacatcgaatttgtatggacggcggcgaacggcaaaattatctctgtaaaggatatctggagttctttcaacatgtgacgccctatatgaatgtgatgcgtcaattattactgaatcagcgacccgccgcgcatattacccgcatcgtcgacatgattgcggatgacgttcgtcagtgacaagaaaatcgcccccttgcgcggtatgatgccggacattaccgtagggtctaagagtcctgtattgttttaccgtcgagtgacattgaaaaggaaatgaaatcagtgaaaaacgtaacgttttgcgggcaggtgacgcttcctgccatcggacagggaacatggtatatgggcgagcgcgcggatcaacgtcagcgcgaggtttcggcgttgcgcgcggggctggatttggggttacgccttattgatacagcggaaatgtatgccgacggcggggcggaaaaggtcgtgggcgaggcgttagcagggcgacgcgatgaggcatttctggtgtcaaaagtgtacccgtggaacgctggcggccagaagatagttgccgcctgtgaagaaagcctgcgtcgtctgaaaacagattatctcgatctctatctattgcactgggccggaagcttttcattcgaagagaccgttgaaggtatggagcggctaatcgcgcaggggaaaattcgccgttggggagtctctaatcttgattatgacgatatgcaggcgctgtggcgcatccctgggggacagcaatgcgcgacaaatcaggtgctctatcatctggcgtcacgtggtattgagtatgatttattgccgtggtgtcaacaacagcgaatgccagtgatggcctatagcccgctggcgcaggctggccggttacgtagcggtttactgaatcatccggtggtgaatgaaattgcgcaagcgcataacgctacggcggcgcaaatcttactgacgtgggtgattgcgcatccgggcgtgatggcgatcccgaaagccggaagtacagaacacgtgaagcaaaatgcggcggcgcttgagatcgccttgtcagcaaacgaacttgccttactggacaacgcctggcctgcgccaaaagggaaaaccgcgttggatatggtgtgacgccggataaaatgtgtaagcgccgccatccggcaggtcatgcctgatggcggctgacgcctttcagatcctatagtaacgccgttatccattcacttttagcgtttagcgacgcagatagtctgcgccagacgagagggtttttcttctgtggcttgttgcggcgcagtagcgtaaaccgtttcaacgcagacaaacgttttatagccgtcatccggcatgtcgcccatgctgacggacaacgccgggccagggttccagcctacgacgttaaggtgatggtggtggaccacatcaatcgtgcggtttaatgtcgcatcgtggatcacgctacatgcttcaggattgaggtaaacgcgatcggtacggtccggaaaggtttgtataccgtcggtcaggacaccttctttagcgtcgttaactttatcaataaaccgatcgccgagtccgctgaccttaacgttggcgatgtcgccaacgttaaaatagctgtggagcgcggatgtggttgcaaattcgccatgcgcttccagttcaatttcacaggttttacccactttaaaacgtgccagcagcgtgaaatcgtgcggccagtatttccgggtggcctcactgctttgcagctcaaatgtcagcattacgccattatcatcttcattatgcgcttttagcgcccacggaagattacgcgcaaagccgtgtgacggcagaccctgttgagccgcaggtccaaaccagggccagcagatcggtacaccgccgcgtagcgccacgccggttttgaaaggcgtattattactgagccacaatacctcttcctcgccaacgggtttccaggagagaaggtgcgcgccctgtaatgcaaaagaggctttaacctgcggatggtcaacgacgatcagatccaggtcatcaagctgacgacgggaaaggacaggggtaagctgttcgataaccgggagggcaaaaattttattaatcattacgcaatcctcttaaccctaaataattcgagttgcatgacaaggcgcttgtgccttgaccagtgcttgcgctggcccgtagaggcgaggccgcaggccgagtaacgcggcaagtgaacgacaaattcatcgggaacgaatttgaacaaccgtaggtaatctccggccagggacatggacatccctgattcatcccgataagttcgacttccgtcagtgattcgggtgagaaagcatagccaacacacctgcaacttgaagtatgacgggtatatctttaagcaaaaaaaagagcgacctgagtcgctcttaccaatgactgtgtcatctcaacttatttggagatgtgagcaatcaggtccagtactttgttggagtaaccggtttcgttatcgtaccaggagaccagtttcacgaagttgtcgttcagcgcgatgcctgctttagcatcgaacacggaagtgcatacttcaccgttgaaatcggtagatacaacgtcgtcttcggtgtaacccagcacgcctttcatttcgccttcggcagcagctttaacagcagctttgatctgctcgtaggtagccgctttttccagacgaacggtcaggtcaacaacggatacgttcggagtaggaacgcggaacgccataccagtcagtttgccattcagttccggcagtactttacctaccgctttagcagcgccagtagaggacgggatgatgttctgagatgcgccgcggccgccgcgccagtctttgtgagacgggccgtcaacggttttctgggttgcggtagtcgcgtgaacagtagtcatcagaccttcgatgatgccgaagttgtcgttgataactttagccagcggcgccaggcagttggtggtgcaggaagcgttggaaacgatgtcctggccttcgtatttgtcaaagttagcgcctttaacaaacattggggtgttgtctttagacggacccgtcagaaccacttttttcgcgccagcggtgatgtgtttacgcgcggtttcgtcagtcaggaagataccggtagcttcagccactacgtcaacaccaacttcgtcccatttcaggttagccggatcgcgttcagcggtaacacggatttttttaccgttaacgatcagatgaccgtctttcacttcaacagtaccgtcgaaacggccgtgagtggagtcatatttcagcatgtatgccatgtactctgcgtctaacaggtcgttgattgcaacgatctcgatgtcagaacgtttctgagcagcacggaaaacaatgcgaccgatacggccaaaaccgttgatacctactttgatagtcatatattccaccagctatttgttagtgaataaaaggttgcctgtaaaattacaaaaaccttacgcagcgtcaagcggaatcgtgtcaatcattgcgacaaatcaatcctctgcacaacctttgcgcggctgattcgcctcactcttcctttcggcttgaaaccacatgggggcgccgccccgaattttaaagggcaaccgagataataatgtgacatcagtcacgattcgtgagccgccatttcgcaatgatcaagtttagaacaaaagttggtactgaggtgttaatgttttgttagaatcggtcaggcaatgtgagcacgtttaaagtgagatgtgagcaaatggctaaccaaccttcagcagaagaactcaagaaaaaattgtccgaaatgcaattctacgtgacgcaggatcgtggcacagaaccgccatttaccggacgcctgctacataataaacgcgatggggtttatcactgcctggtctgtgatacgccgctttttcactcccacaccaaatacgattcaggctgcggctggcctagcttttaccagcctgtcagcgaagaggcgattcgttacatagacgatttttctcatggaatgcagcgtgtcgaaattcgttgcggtaactgcgatgcgcatctcggacacgttttcccggacgggccgcagccaaccggtgagcgctattgcgttaactcggcctcgctggccttttctgacgagaaaaacggcgatcaactgaaaggctgaaaaaacgattcagcaaattattccacaggagcggacacatcatgaatcttgatgagatcattaacagcatgacgccggaagtgtatcaacgtttatccaccgccgttgagctgggtaaatggccggatggcgtggcgttgacgccggaacagaaagaaaacagcctgcaactggtgatgctatggcaggcgcggcacaataccgaagcgcaacatatgacgatcgatactcacggtcagatggtgatgaaaagcaagcagcagctcaaagcggatttcggtattacgtcaaagccgattgcgacattgaaaatgcagtaacggcagccggataagaggtagccgccatccggcggtttcattgccaatgcgttgtgcttaccgggcctgctcattgctgtcaggcacaggcccgccatatttttacccattaacgcttaatgtccagcgagtccgccaactgtttcgctaactgattattgtcatcggtgccttattcccagaacattgcgccagccagcccgcgctttttaatctgttttgttagaagcgctctccagcctgcgttgagctttgcctggtagcgacgctgacgtgacgtatccggcccaaagatctatgcaatggtctcaccgttgcgtgatgtattgaccggatacgatacctgctccgctacctggcgacagcctggccctgcgtctcttcccagtctgccagcgtatacagcgtcgcgcctgccgacgccatctccataaacgcgtgcgcgctatcctgcgggtgaatattcacgccgcgacagccatcggtgataacgttaacggcatagcccaactctagcgcatccagcaccgtaaattttacgcagtaatcggtcgccaaccccatcacgataagctcggtaacgtcatgctcgcgaagccaggtatcaagggtagttttctgccgatgttcgttgtcaaaaaacgcactgtagctatcaatcagcgggttttcacccttatagatgcaggcgtcaatcgcatgttggttaagcaggggatgtaacgccgcgccgtcggtatgttgaacgcagtgatccggccagagcgtttgcggcagcccgtccagctttccctgactatagggttccgcctgatgctggctggcgaagctgccatgctgcgcgggatgccagtcctggctggccagcaccggaatctgccggggctggcaccagtcaataagagcgttggcgatgtcgatggtgctgtcgccttccgctacagccagcgcgccgccggcgcaaaaatcattttgcaagtcgaccagtaataaggcccggtttgtcattatcttctccttgtcgtcgggattttttaatcatccggcgtcaattcaccacgcaagttttgcgccatcgcgctacgaatcgcctgagtgtccagaccctggcttaacaaataatgcagtttggttaaggtggcttcgacggtcatatcggcaccgccaatcacgccagcgtgcgccagcgcattaccggtagcgtacccgcccatattgactcgccctgacatgcattgcgtcaggttaaccaccacgatgccgcgcgaactggcctctttcagctcctgtaaaaacgctttattttgcggcgcgttgcctacgccataagagcgcagaatcagcgcttttaccggctgacgcagaaagttacgtactacctcggcggaaatccccggataaatcgtcactacgcctatcggctgcggcgtaatagggtgaacgattaattcaccagaaccgtagggcgcgggaggcgtatttaaacggcgaatgtgaattcctgcttccagcaagggcggcagattgggagaggcaaaagcgtcaaacccatccgcatgggctttggtcgtgcgattaccgcggaacagacgattattaaaaaacagcgttacttcattaatagggtagttggcggcgacataaagcgcattcagcaaattaatttgcccgtcggagcgcagctcagccagcggaatttgtgaccctgtcacaatgaccggtttacccagattttccagcatgaaagagagcgccgatgcggtaaacgccatcgtgtcggtgccgtgcagaataacaaaaccgtcatactcatcgtagtgcgctttgatatctgcagcgatatgctgccagtcttccggcgtcatatctgatgaatccatcagcggggcatattcatggatggtaaaatccggcatctccgggcggtggaattccggcatcagcgccagctggcgctgaaggtgcccggacaccgggatataccctttatctgagcgctgcataccgatagtaccgccggtataggcaacgtaaattgatttcttttgcatgataatgttcagtcgtgtcgcgaaggacgtattaatgattatcggatggcggctatgagcagacgccgccatccggtatggctattgatgaagcattagcgaacgttcgcgcaagtcaaacagaacgcataacggttttgcggatcgttaaatgccgccagtttatccccctcggccttcaccgtgttggcggcggaaacgagcggcgccgggagcatcgcctgaatggtctccggcagcatggcgcgtactgatccggtcatactgtccatgaccatatcaaggaccgtcggttcgtcctgatagtaatcaagatgccactgtttcagtttcgccagctccgccgctttggcgacggcgtcgtcaaagtcgccgagactgtccaccagaccattggctttcgcgtcttctccggtccagacatggccttgtgcgattttatcaatttgctccggcgtacgcttacgcgcgtctgccaccagcgtgataaagcgtttgtagccgtactcaatactgagttgcatcatctgctgcacttccggtgacagcgctttggtcatcgaaatatccgccagcggcgaggtggaaacgccgtcgctgtgtacgccaatcgacgacaggctgttttctaccgtattgatgacgccgaagatgccaattgaacccgtcagcgtgctggggctggccacgatatagtttgccggcgtagagatccagtaaccgccggaggccgccataccgcccattgagaccaccaccggtttgccagccgctcttgccgccgccagttcggcgcggataacttcggaggcgttgacgctaccgcctgggctattgacgcgcagcacaatcgctttcactttaggatcaaggcgtgcgtcgcggatctgcgatgccgtagtgtcgccgccgacattccctggcgtttcttcgccatccataatcgcgccattggcgaaaataaccgcaatagtaccgccggtatccgcaggcgttttcagcgaataatcgtaatagctgatcgcgcgatagttattttcggttttgctccagccaaactgcttcgtcagcgctttttcaacatctgcgctggaggcgagggcgtccaccagtttatggtcgagcgcatatttggcggtgtcgccgcccacgctggttaacccgtcgataatagcctgcgcgccggggaagagttgttgcggcgaaatctggcgattggcggaaacggtatgcaggtagttctgccacagttcgcctatccagcggctgtcggcctcgcgggcggcgggcgacatatcgtcgcggataaacggctcgacggcggatttataggtgccgacccggaaaacgtgggtagagactttcagtttatccagcagcgttttgtagtacaggccattcgtagcgaagccgtgaagatctacctgaccctgtggggaaagccaaattttattagcgaaactggcgagataatactgaccctggctgtagttttcacccacggcgaaaaccggtttgccgctgtcgcggaattcgcgcagcgctttaccgatatagcgcattgatggctgatcggcgccggtgaagtttttcagatccagaacgatacccgtgatattacggtcatctttcgcctgacgaatagcgttgacgatgtcaaacagggagttttcctgcagacggtcggagctggcgccaaataactggcgacccagcgcgcccagacgatgattggtggagggtttatccacaatgacgccggaaatatccagcagcagagcgccgcgcgcggtttgctcactgttgctgccgttaccgatctgcatccagatcccaacgcccaccaggaccagaaaaataaagaacaggttgagtaccatttcacggacgaagttcaacactcgccacgtccatttaaaaaatccggcaataaatcgccacagggttcgcatgtattctccctatctgagtaacaacgcttgtaccttggtgaggataaagcattaagatgtggctatcgtaatgacccatcaggcagttgtcagcaggaatcactgcctgcgctgtaacaaaatccgctcccgtgttaattttgtgaataaatatcattgctggagttaatcaaatggatgcactagaactgctggtcaaccgtcgtagcgcctctcgtctcgcagaaccggcgcctgtcggagagcaattacagaacattctgcgggcgggaatgcgtgttcccgatcataaatctctacagccgtggcgtttttttgtgattgaaggagaggggcgcgaccgcttcagcgccgtacttgaacaaggcgctgtcgctgccgggggggatgagaaggcgatcgaaaaagcgcgtaatgcgccgtttcgcgcaccgctgattattaccgtggtggcgaaatgcgaagaaaaccataaggttccggtgtgggaacaggagatgtctgccggatgcgcggtgatggcgatgcaaatggcggcgattgcgcaagggtttaatggtatctggcgtagcggcgcattaacggagagcgctattgtgcgggaagcctttgagtgccgcccgcaggataaaattgttggttttctctatctcggcacgccgcagctcaaagcgtcaacgacgatcagtacccccgaccccacgccgtttgtgcgttatttctgacgctgagggataaaactgtctggattctgagcaaaggcgcggtaattcagacagtgatacttaccacatcagggaatgagcgctaccatagcgcgaatgcaatgacaggagatgtccatgagcgagcaagccattcgtttaacgcaatacagccacggcgctggttgcggttgtaaaatttcccctaaagtgctggagactatcctgcatagcgagcaggcgaagttcgtcgacccgaacctgctggtgggtaatgaaacccgcgatgatgcggcggtttacgatctgggtaatggcaccagtattatcagcaccaccgacttctttatgccgatagtcgacaacccgtttgattttggccgcattgcggcaacaaacgccatcagcgatatttttgcgatgggcggcaaaccgattatggcgatcgcgatccttggctggccgattaataccctgtcgcccgatattgcgcgtgaagtgaccgagggggggcgttttgcctgccgtcaggccggtatcgcgctggcgggcggacactctattgacgccccggagccgatctttggtctcgcggtcacaggcgtagtgccgaccgaacgggtgaagaaaaacagtaccgcgcaggcgggatgcaaactctttctgaccaaaccgttggggattggcgtgttgaccaccgccgagaaaaaatcgctgcttaaacctgaacatcaggggctggcgacggaagtcatgtgtcggatgaacgttgctggcgcggcgtttgccaatatcgacggcgtaaaagctatgactgacgttaccggttttggcctgctggggcacctgagcgagatgtgccagggcgcaggcgtgcaggcgctgctttgctatcaggacatccctaaactgccgggcgtggaagagtatattgctctgggcgccgtaccgggcggcacagagcgcaacttcgccagctatggtcatctgatgggcgacatgtcgcgtgaagttcgtagcctgctgtgcgatccgcaaacgtctggcggtctgctgttggcggtaacgccggacgccgaagacgatgttaaagccaccgcggcggaatttggtatcgatctgaccgcgattggcgaactggtcgaggcccgcggcggtcgcgctatggttgagattcgttaacctgatgcggttgtttattgccgaaaaaccgagtctggggcgcgccattgcggatgtgctgccaaaaccgcaccgtaaaggcgatggttttattgagtgcggaaacgggcaggtcgtcacctggtgtattggtcatttgctggaacaggcgcagccggatgcgtatgacagccgttatgcgcgctggaatctggctgacctgcctatcgtgccggaaaaatggcagcttcagcctcgtccttccgtcaccaaacagctcaatgtgattaagcgctttttgcatcaagccggtgaaattattcacgccggcgacccggatcgcgaagggcagcttctggttgatgaagtgctggattatctccagcttcctgccgaaaagcgccagcaggtgcggcgttgtctgataaacgaccttaacccgcaggcggtcgagcgtgctattgacaggctgcgggcgaacagcgacttcgtgccgctgtgcgtatccgcgctggcgcgagcgcgagcggactggctgtatggcattaatatgacccgcgcttacacgatcctgggccggaatgccggctatcagggcgtgttatccgtgggacgcgtgcagacgccggtactggggctggtggtgcggcgagacgaagagattgagaacttcgtcgccaaagacttctttgaagtgaaggcgcacatcgttacgcctgccgacgagcgttttaccgctatctggcagccgagcgaggcgtgcgaaccttatcaggatgaagaggggcgcttgcttcatcgtccgctggcggagcatgtagtgaaccgaatcaacggtcagcccgcgctggtaaccagttataatgataaacgggaatcagaatccgcgccgctgccgttttcgctctcgacgctacagattgaagccgccaaacgctttggcctgagcgcgcaaaacgtgcttgatatttgtcagaagctatatgaaacccacaaactgattacctatccgcgttccgactgccgttatctgccggaagaacactttgccggacggcaggcggtcatgaacgcgattagcgtccacgccccggatttactgccgcagcctgtggttaatcctgatacgcgcaatcgctgctgggatgacaaaaaagtggatgcgcaccacgcgattatcccgacggcgcgcagttcttctgtccatttgacggaaaacgaagcgaaagtgtacaccctgattgcgcgtcagtatctgatgcagttctgcccggacgcggtgtttcgtaaatgcgttattgaactggaaatcgccaaagggaaatttgtcgccaaagcgcgttttctggcggaagccggttggcggacgttactgggcagtaaagagcgcgacgaggaaaacgacggtacgccgctgccggttgtcgccaaaggtgatgagttgctgtgtgaaaagggggaagtggtcgaacgccaaacccagccgccgcgtcatttcactgatgcgacattgctttccgcgatgaccggaattgcccgcttcgtgcaggataaagatctgaaaaagatcctgcgcgcgaccgatgggctggggacggaagccacgcgcgccgggattatcgagctgctgttcaaacgtagctttctgaccaaaaaaggtcgctacattcattctaccgatgctggcaaagcgttaatacattcgctgccggagatggcggcccgtccagatatgaccgcgcactgggaatctgttttgacgcaaatcagcgaaaagcagtgccgttaccaggatttcatgcaaccgctggtcggcacgttatatcagctgatcgagcaggctaagcgcacgccggtgaagcgcttcagagggatagtcgcgccaggcggtggagacaagaaaaagagcgcgccgcgtaagcgagcgggcaaaaaaagcccgcctgctgcggagacaggccgtcagaccgaataagcgtaaagctatctggcctgacgacgggattaaatgacgccctgcgccagcatggcgtcggcgactttcacgaaaccggcgatgttggcgccctgaacgtagttggtatgcttattgtcgccgccgtattcgacacaggcgtggtggatatccagcataatgtgatgcagacgggcgtccactttctcggctttccagctcaaccgcgcggcgttctgcgccatttccagccccgatgtcgccacgccgcccgcgttggcggctttacccggcgcaaacagtacgcccgcttcaaggaagagatcggtcgcttcaatcgtggttggcatatttgccccttccgccacggcttttacgccattggcaatcagtacgcgcgcggcgtcaacgtccagttcgttctgcgtcgcgcatggcagggcgatatccaccggtacgctccagggctgctggccttccagataggttaagccaaactcacgggcgtagtcagcgacgcgaccgtcacggctggctttaatttcacacagacgcgccagcttctctggcgtgaagccactttcatcgaccaccgtcccgctcgaatccgacgcggtaaccacgcgcgcgccaaaggccatcgctttctcaatggcgtattgcgctacgttgccggagccggacacggcgacgcgcatcccttcgaaaccgagaccatgacgtttaagcatcgcttcggtaaagtagaccaggccatagcccgtcgcctccgggcgaatcaggctgccgccgaaggaaagccctttgccggtgaagacgcaggagctgttattggaaagcttgcgcatcattcccgccataaagcccacttcgcgcccgcccacgccgatatccccggcaggcacgtcggtatccggccctaaatggcgatacagttcagtcatcagcgcctggcagaaacgcatcacttcgccttcgcttttccctttcggatcgaaatcgctgccgcctttaccgccgcccatcggcaacgtggtgagggcatttttaaaggtttgctcaaagccgaggaacttaaggatggaaaggtttaccgaaggatggaagcgcataccgcctttataggggccgatagcagagttgaactgcacgcgccaggcgcgatttacctgcacctggtttttgtcgtccagccacactacgcgaaactggattacgcgctctggttcaaccaaacgttccagtaaagacatgtggcggtaacgggggttttgttcaagaaacggccacagggtggtcatgacttcacggacggcttgcgcgaactcggtttgatgcgggtcgcgcttttgtacatggttgaggaacgattccagagaacatgtctgatccatagatataaaaacctcttatatattaatgtggttgtatttgcgttttatcagaatatgtatttgcagttttcgactataccatcagcaatgtgacggtaagcaagaaaaaaatgacgctgctaagtaaattcataacggggcgagggtcataactaaaagcgatgacaaaagaggattaaagttttcacggcggcttaccgttatactgagaatatacttagaaaaataaggaaatcctatgcgccgaagcctcgtggtcgccgtgatggcgataatgccaatggtcgggctggcaaaccagaacagtcgtcctgatattcaggtgaatgtcccgccggaagttttcagcacgcgcggtcagtcgtcccagccctgcattcagtgctgcgtttaccaggatcagaattactccgaaggcgcggtaataaaagtggaaggcgtcttgctccagtgccagcgtgacgaaaaaaccatcagcacgaatccgttagtctggcgtcgcgtaaagctataaacgcctgcaatagcggaatatccgccggggcgagggggtactccagcgcctcttccggcgtacaccaggctaatgcctgatgttccagcgcacgtatcagaccgttaaacgcaggcacatgccaggcgtgcaaatgaattcgtcggccagacacgtcgcgttgatggctggcgatatagacgccgggcgtggcgtcaatccctaactcttcgcgtagctcgcggataagcgcctgcggctgggtttcgccgggttcgactttaccgccggcaaactcccataaaccggcttgatccgcatgagctgggcgctgggccagcagaattttgccgtcgcattcaatgatggcggcaacaacatcgagtttttttatcattgtcgttaaggtcgttattcctgccgggaagcgtcgcgctatcccggccttacggttaatcagaaagcggaatcaaacacgaaacgtcgcccagaccggcgcatggtcggagggtttttccatactgcgaatgtcgtagtctataccggtttctgcgcaacgttccgccagcggagcgcttgccagcaagaggtcgatacgcagcccgcgattatccacgaaacctttcgagcggtaatcaaaccacgaaaatttatccatcgtttgcggattcgcctgacggaacgtgtccactaatccccacttcagtaaccgtgacatccattcacgctcctccggcaggaaggagcatttaccggtacgcagccagcgtttgcggttttcttcgccgatgccaatatccagatcggtcgggctgatattcatgtcgcccataattaataccggattatcgcacttgagttccgtttcaagatagttttgcaagttctgataaaactgcgctttcgcggggaacttcaacggatgatcccggctttccccctgcgggaaatagccgttaatgacggtgatattacccagcggcgaggggatttccgccatgataatgcggcgttgcgcctcttcgccatcatccgggaaaccgcgtctgacggaaatgggcgtggcttttgttagcagcgcgacgccgtaatggcccttttgtccatgatagaaaacgttatagcccagcttcgcgacctcttcgagcgggaacatttcgtcgtggacttttgtctcctgtagaccgatcacatcgggctggtgtttttcgacaatcgcttcaagctgatggggacgggcgcgcaggccgttgatattaaaagagacaaatttcatagtcactgccactttgcaaggtgaatcgtgttgggatggtaacagaaattttaccgggtgactgccactcatcgtcagattcggccaatggaagcgtatggtgttttctatagcgcgaaaatggcacggtttgcgtgcagatgcgccagaacggggcggtaatttccagtaaatttcgtataagatcacaattccagaattatatttggcaactgaataatatttcgctttttcctctttttagccaccgattatgcggaaatattcacttttcatgcagtaaaagtgaatatcgctacgctgtaacccattgatttaccgtttatcacctctgtttatgcaatgttaacgctggctggcacgaatgctgcaatctacatttacagcgcaaacactcatattaattaacatataaataactttatttttaccaaaagaggtcgctatgtctctgtcagttacgcgcgaaaactttgatgaatggatggtgccggtatacgttcccgcgccttttattcctgtacgcggagaaggctcacgcctgtgggatcagcaggggaaagagtatattgattttgctggtgggatcgcggtcaacgccttgggacatgcgcatccggcgctgcgcgaggcgttaaatgaacaggcgaatcgcttctggcatatcgggaacggttacaccaatgaaccggcgctgcgactggcgaaaaaactgatcgacgcgaccttcgccgaacgcgttttcttttgtaattcaggcgctgaagcaaatgaagctgcattaaaactggcgcgcaaatatgcccacgatcgtgtcggcaaccataaaagcggcattgtggcctttaaaaacgcgttccatggccgcacgctctttaccgtcagcgctggcggtcaacccacctattcacaggactttgcgccgctgccgccggatattcgtcatgcagcctataacgatctgaactccgccagcgcgctcattgatgacaatacctgcgccgtgatcgtagaaccggtgcagggcgagggcggcgtgatccccgccacgaaagcttttttgcaggggctgcgtgaattgtgcgaccggcatcaggcgttactgatttttgatgaggtgcagacgggcgtcggacgtaccggcgaactgtatgcatatatgcattatggcgttacgcccgatatcctgacgaccgctaaagcgttgggcggcggcttcccgatcggcgcgatgctgaccacgcaagactatgccagcgtcatgacgccaggcacgcatggcaccacctacggcggtaatccgctggcgacggcagttgccggaaaagtactggatatcatcaatacgccggagatgcaaaacggcgtcagacagcgccacgatgcgtttattgaacgtctaaatacccttaatgtgcgttttggcatgttcagtgaaattcgcgggctggggctactgcttggctgtgtgctacagacggagtttgccggaaaagccaaactcatcgcccaggaagcggcaaaagcaggcgtgatggtgctcattgccggtggcgacgtggtgcgttttgcgccagcgttaaatgtgagcgacgaggagatagccaccgggcttgatcgttttgccctggcgtgcgaacgccttcagacgggaggcgtaccatgcgggtgattcgtcctgtcgaacatgcggatatcgccgcgctgatgcagcttgcaggcaaaacgggcggcggcttaacctcgctaccggcaaatgaagcgacgctggcggcccgcattgaacgcgcgctaaaaacctggtccggcgagctgccaaaaggcgaacaagggtatgtattcgttctcgaggacagtgaaacgggtgaggtcggcgggatctgcgccattgaggtcgcggtcggccttaatgacccctggtataactatcgtgtcggtacgctggttcatgcctccaaagagctgaatgtatataacgcgttgccaacattattcctgagtaatgatcacactggcagcagtgagctttgcacgctgtttctcgatcccgaatggcgtaaagagggtaacggctacctgttgtcaaaatcgcgctttatgtttatggccgcgtttcgcgataaattcaatgagaaagtggtggcggaaatgcgcggcgtcattgacgagcacggttattctcccttctggcaaagtctcggcaaacgctttttttctatggatttcagccgggcggattttttatgcggtaccgggcaaaaagcgtttatcgccgagctgatgcccaaacatcctatttatacccacttcttatctgaagaggcacaggccgtgattggcgaagtccacccgcaaacggcgccagcccgcgcggtgctggaaaaggaaggctttcgctatcgccactatatcgacatcttcgacggtgggccgacgctggagtgtgatattgaccgggtgcgggctattcgtaaaagccgactggttgaagtcgcggaagggcaacccgcgcctggcgactatccggcatgtctggtcgccaatgaaaactatcaccactttcgggccgcgctggtgcgtgccgatccgcagacttcacgacttgtacttaccgcagcgcagttggatgcactgaaatgtcgcgcgggcgaccacgttcggctggtacgcctttgtgctgaggagaaaaccgtatgacgctatggataaacggcgactggataaccggtcagggcgaacgccgccgcaaaacgaacccggtgagcgcggagatactttggcaggggaatgacgctaatgcggcacaggtcgccgaggcctgtcaggcggcgcgcgcggcgtttcctcgctgggccagacagccttttgccgcacgacaggctatcgtagagaaatttgccgccctgctggaggcacataaagccgagctcacggaggtcatcgcacgtgaaaccggtaaaccgcgctgggaggcggcgacggaagtgacggcgatgatcaataagattgccatctcgattaaggcttaccacgccagaacaggcgcacaaaaaagcgaacttgtcgatggcgccgcgacgttgcgccatcgtcctcacggtgtgctggcggtattcggcccttataactttcccggccatttaccgaatggccatattgtgcccgcgttgctggcaggcaatacgctgatcttcaaacctagcgagctaacgccatggaccggggaaacggtaataaaactctgggaacgggcggggctaccggcaggcgttcttaatctggtgcagggcggccgggagaccggacaagcgctgagttcgctcgacgatctcgacggactgctgtttaccggcagcgccagtaccggatatcagcttcatcgccagctatccggccagccggaaaaaatcctggcccttgaaatgggcggaaacaacccgctcattattgaggatgcggcaaatatagatgcggcggtacatctgacgctgcaatcggcgtttattaccgccggacagcgctgtacctgcgcgcgacgccttctggtaaaacagggtgcgcagggagatgcatttctggcgcggctggttgacgtcgccggacgtctgcagcccggcagatgggacgacgatccgcagccgtttatcggcggactgatttcagcgcaggcggcacagcatgtgatggaggcctggcgtcaacgagaggcattaggcggtcgcacgctactggcgccgcggaaggtcaaagagggaacctctctgctgacgcctggcatcattgagctgacgggcgtcgcggatgtgccggatgaagaggtgtttggtccgctgctgaacgtctggcgttatgcgcatttcgatgaggcgattcgtctggcgaataatacccgttttggtctgtcgtgtgggctggtgtcgacggatcgcgcgcagttcgaacagctcttgctggaggcgcgggcagggatcgttaactggaataaaccgctcaccggggcagcgagtactgcgccgtttggtggtgtcggcgcgtctggtaaccatcggcccagcgcctggtatgccgccgattattgcgcctggccgatggccagtctggaatctcccgaactaacgttgcctgcgacattaagccccggcctcgacttttctcgcagggaggcggtatgacggcgcatgaagttaattttgacgggctggtggggcttacgcaccattatgccgggctatccttcggcaatgaggcatcgacccgccaccgttttcaggtgtcgaatcctcgtctggcggtaaaacaggggctgctaaagatgaaagctctggcggatgccggctttccccaggcggtgatcccgccgcatgagcgaccttttattccggcgttgcgtcagctcggcttcacgggtagcgatgagcagattctggataaggttgcgcgtcaggcgccacgctggctttccagcgtgagttccgcgtcgccaatgtgggttgcgaatgcggcgacggtttgcccatcggcagacgcgctggacgggaaagttcacctgacggtggcgaatttaaacaataaatttcatcgcgctcttgaggcgcctgttaccgaagcgctgctacgcgccatatttcgcgatgaaagccagttttcagtgcatagcgcgttaccgcaggtcgcattattgggagatgaaggcgcggcgaatcataaccgtcttggcggcgagtatggttcggcaggcgtgcagctttttgtctatgggcgcgaagaggagaatgaaatacgacccgctcgttatccggcgcgccagagccgcgaagccagcgaggccgtggcgcgtcttaatcaggtgaatccgcaacaggttatcttcgctcagcagaacccggaggtcatcgatcaaggcgtattccataatgatgtcatcgccgtttcgaatcgacaggtattgttttgtcacgaagcggcgtttgcccggcagaaagtgctcattaatcagttgcgtacgcgcgttgacggttttatggcgatagaggtgcccgccggcgaggtttctgtatcagatgctgtggcgacctacctgtttaatagtcagttgctaagccgtaacgacggctcaatgctgttagtgttgccgcgggaatgtcaggaccatgtcggcgtctggcgctatctgaataagctggtggcggaggataaccccatcagcgcgatgcaggtgtttgatttgcgagaaagtatggccaacggcggcggcccggcctgtctgcgattacgcgtggtgttaacagaagaagaacgaagggcggtgaatccagcggtaatgatgaatgacgctctgtttacggcccttaacgcgtgggcggatcgttattatcgcgatcgcctgaccgctgccgatctggccgatccgttattattgcgagaaggccgggaggcgctggatgtgttaacgcgtctgctggatttggggtcggtttatcctttccagcaaacgggggcggctgatggataactttctggcgttgacgctaagcggcacgacaccgcgggtgacgcaggggaagggcgcgggttttcgctggcgctggttaggccatggtctgcttgaactcacgcccgatgcgccggtcgaccgcgcgttaattctttctgcggggatacacggtaatgaaaccgcgccggtcgagatgctggataagctgctgtcggcgctgtattcaggcagcttgacgttaacgtggcgagtgctggtggtactcggcaatccgcaggcgctggcggcgggaatacgctattgtcacagcgatatgaaccgtatgtttggcgggcgttggcagtcctttgccgaaagcgatgaaacgcggcgggcgcgtgagctggagctaagtctggagaccttcttttcatctggccaggcgcgggtacgctggcatctggatctgcataccgccattcgtggctcgcatcatttgcgttttggcgtattgccgcagcgcgaccgcccgtgggagacagattttctggcgtggctgggcgcggcaggactagaggcgttggtatttcatcaggcgcccggcggtacgtttacgcactttagctctgaacatttcggcgcgctttcctgtacgctggagttgggaaaggcgttgccgtttaggcaaaacgatctgacgcagttcaacgtaacctcgcaggcgttgtcggcgttgctgagcggtgtcgaaacgtcaacctcgttttcgccgccgctacgctatcgggtggtgtcgcaaatcacgcgtcacagcgacaagttcgcgctttatatggatgcgcaaacgctgaattttactgcctttgcgaagggaacgttgctggccgaggagggggataagcgcgtgacggtgacgcatgacgttgaatatgttctctttcctaatccctctgtcgcctgcggattgcgggctggattaatgctggaaagactgccctgataaatgtccctgtaagctcacgttaggattacagggatgatttgggacacagtttcatgctattacggattattcctggagaattgctttattaataagcgttgctgcgttatagttctgcataatttctgctatatcatgctgttgtatatttctctttcaactctgcgcaatttattctttttttcttcacaattggcgaaaaagtgttttttatactttcattgttttaccgttgttatgactaattgacgctaagacggttaaagttaatcacgacaacacggcgctgttttaaatatgccgtaaaaataactgaaaggaaggatagaaatatgcgtaaactgactgctctatttgttgcctctaccctggcgatgggtgctgcgaatctcgctcatgccgctgagactaccaccgccgcgccagcggatgcgaagccaatgatgcagcataaaggtaaatttggcccacatcacgatatgatgtttaaaaacctgaacctgacggacgcacagaagcaacaaattcgcgacattatgaaagcgcagcgcgagcaaatgaaacgtccgctgctggaagagcgtcgcgccatgcatgatattatcgccagcgataccttcgataaagccaaagccgaagcgcaaattacgaaaatggaagcgcagcgcaaggccaatatgctggcgcatatggaaacccagaataaaatttataacgttctgacgccggagcagaaaaagcaatataacgctaattttgagaagcgtctgacggaacgcccggcgcaagaaggtaaaatgcctgctgcggcagaataactttccgcataatttaagaccgccggtcttgtcgacaacacaatcgttgaggtggacaggatcggcggttttctttatgactggcgacagtcggtgtgcagttcaatgatctcatattgacctgacattaacggtttacagagaatcttatagccgtcctgatcaaaacccgcaggtgtgcgcaccagggtggcggcctcatccagcgagggtaccgcccccagccataaccaattgttgataatgtggaactgggtcatttgtgggcggctctcttttaacgcgatagcgcctttccagggccagcaaaccacacgtaaccgttccagcgaggcctgcagacgaagaaaatgcgcctgcggggtttcttgcccacaacacgcgccagcgcagcgcttcagagcgaaacgaaaacaggcgcgcccacggcttaccggttcaagccccagcaggccataacacaatttttgttcatcggcgaggttctgtaagctttgcagcgccgcccgacggttggcgaagaggccaaacaggtttggctcatgggaaaaatcgacgctgcgggcggaaacgacctcaatcttttgttcgctcaactggagagagcaaagctggcgattacgccgtaaccgcttgttaaacagcggctgttgttctttgatcagccgcgcctccagcagcaacgcgcccatttccccagcggtgcagatccagcttatccgccgcgcctgtcgcagcatagtggcctcgtcaggcgttcgcagatgtgaaagcacccggctgcgaatattcacgcttttaccgatataaagcggcagcgtatcgctttcgctatgaaatatatagacgcccggtaaggctggcgcttcgctgaggaaaggacgtaaatgttctggatattcgtaaatggccgccgcttcaaactcaaggcggggggctgattgacgccgtaccacagtgatctccgttaactggttattcatccagtataacagcggatgggtgattaaaaaagaggctgggaagagaggaggccggatagacgagcgatatccggcacaacagtagaagtacgcttaccttttccaaaagtcgtcgaataccgtaatcggtaaacggcgcttatgttcagtttttacataccagccttcgatagttttagcgatggcggggtccagcgttttgccttccaggtaatcgtcaatattgtcatacgttacgcccagcgcggcttcatcaggcagtgaagggcggtcgtcttccaaatcggcggtggggacttttttatacagatgctcaggacagcccagcgctgcgagaagctgtttgccctggcgtttgttaaggcgatgaagcgggttaatatcggtaccgccgtcgccatatttggtgaagaacccggttatcgcttccgccgcatggtcggtgcccaccacgacgccgtgagtcataccggcgatgctatattgcgctttcattcgctcacgcgctttttcattgccgcgaacaaaatcgctcagctcaattcccgcttcgcgcagcgcctgttcgctggcgaggacggcgcctttaatattgacggtgagtactctgtccggctgaataaaagcaatggcgtcctggcaatcctgttcatcagcctgtacgccataaggcagacgaacggcgataaactgcagcgcattatcaccggtctcttctcgcaattcggcgatagccatctggctgagtttcccggccagcgtcgaatcctgcccgccgctgatgcctaacaccagcgatttcaaaaagggataggttttcaggtacgctttaagaaaatccacgctgcggcgaatttcttcttcagggttgatatgcggtttcgcgccaagcgcctggattatctcttgctgcagagtcatttaacccccttcgacattaaaaaaatgaatctttaccctgttaaagctaacccttcgccgctgaaacaacaaggtttggcgggctaagcggtgtttaaaacaacatgtcgctgcgttagagaattttccgaaagactttttgtggcgaggcgcggcttgaaaaatgttctgatgtattccaggcttacataacacgctgataaacaagaggacggaaaatgaacaagaacgtagcaggaattttaagcgcagcggcggtaatgactatgctggcaggttgtacggcgtatgatcgtacaaaagaccaatttgttgagcctgtcgttaaagatgttaaaaaaggaatgagcagggcgcaagttgcgcagattgcgggcaaaccgtcatctgaagtgagtatgattcatgcgcgcggtacctgtcagacctacatcctgggtcaacgtgatggtaaagcggaaacctactttgttgcgctggatgataccgggcacgtgattaactccggctaccagacctgtgcggagtacgacactgacccacaggcgccgaagcagtaacaactgtacattgcctgaacattcaaggaaaccggcctgcgagccggtttttttgtgcctgccataaccttatttattatcgcgaattatttgcccgaaatgtgaggggggtcataacgccaggtcaatgagagacaatttagtgggtcaaggaaataccatccggtggtccgatcccgtatactcatttcagccacctaaaaaagtaaatccggttacgcaagtcgcccagagtatggatgcaggttgaggcttgcggcgtatctggttgacagataatcgcacatgaggaaggtttttatggaaaagaaacacatttatctgttttgttctgcgggcatgtcaacatcgttactggtatcaaaaatgcgcgctcaggctgaaaaatatgaagtgccggtgattattgaagcattccctgaaaccctggccggtgaaaaaggcccggcagcggacgtcgtgttattaggcccgcaaattgcttatatgctccccgaaattcagcgtttattacctggtaaaccggtagaagtcattgattcaatgttgtacggcaaggtagatggcttaggcgtgcttaaagctgcggtagcggcaattaaaaaagccgccgcgaattaattattttttaatttttcccgtcaaagagttatttcatacactaaccgcaatattttattgcggtatttaagggtatttttctatgagtaacgttattgcttcacttgaaaaggtactccttccttttgctgtaaaaataggaaagcagccacacgttaatgcaatcaagaacggctttattcgtttaatgccattaacccttgcgggggcgatgtttgtattaattaataacgttttcctgagctttggggaggggtcgtttttttattccatgggcattcggcttgatgcctcaaccattgaaacacttaatggattgaaaggcatcggcgggaacgtctataacggcacattgggcattatgtcgctcatggcgccattttttatcggcatggcgctggcggaagagcgcaaggttgatgcgctggccgccggattgctttccgtggcggcatttatgaccgtaacgccgtatagtgtcggcgaggcctatgccgtaggcgctaactggctgggtggtgcaaatattatctccggtattattattggcctggtggtcgcggagatgtttacatttattgtccggcgcaactgggtgattaagctaccggacagcgtaccggcttcggtgtctcgttcattctcagcattaattcccggctttattattctctctattatggggattatttcctgggcgctgtctaattacggttctaacttccatcagattattatggacactatctctacgccgctggcatcgctgggtagcgtggtagggtgggcatatgtcatttttgtaccgctgctgtggttctttggtattcatggttcgctggcgctgaccgcgctggacagcggcatcatgacgccctgggcgctggaaaacatctctatttaccagcagtatggctccgtcgatgcggcgctggaagccggtaaaacgttccatatctgggcgaaaccgatgctggattcttatatcttcctcggtggtagcggcgcaacgctgggtctgatcatcgctatcttcctggcatcccgtcgcgcggactatcgccaggtggcaaaactggcgctgccgtcaggtatcttccagattaacgaacccatcctgtttggcctgccgattattatgaacccggtgatgtttatccccttcattctggttcagccgattctggcggcgattacgctggtggcttactatttgggtattattccgccgattaccaatattgcgccgtggaccatgccaaccgggttgggggcgttctttaacaccaacggcagtgtcgccgcgttgctggttgcgctatttaacctggcggtcgctaccctgatttatctccccttcgtggtggtggctaacaaagcgcagaacgccatcgagcaggaagaaagcgaagaagatatcgctaacgcactgaaattctaaactccgcgccggcatgggatgccatgccgggctgaatcagaggaaagactatgtttgatcttgaaaatgttgtagataaccagaccgcggctgaggaactcgaagaagtcgttatggggcttatcatcaattctggtcaggcgcgcagcctggcatatggcgcgctcagaaaagcgaaagaaggcgattttgaggcggcgaaagcgatgatggaccagtcgcgcatagcgctcaatgaagcgcatcttgtgcagacaaaactcatcgaaggcgatcagggcgaaggcaaaatgaaagtcagtctggtcctggttcacgctcaggatcatttgatgacatcaatgctggctcgtgaactgatcgccgagttgattgagctccatgagaaactgaaataacagggggcggatgatgcagctacaggttaacgcaacggaaatcaaaacggtttatgagcagcagctcttcaatggcaaaaatttccatgtgtttatctataacaagacggaaagcgtcaccgggctgcatcagcacgactactatgaatttaccctggtattaaccggacgttattaccaggagattaacgggaagcgtgtgctgctggaacgtggagattttgtttttatcccggtggggtcgaatcaccaaagtttctatgagtttggcgcaacgcgtattctgaacgtaggaattagtaaacgtttttttgaacagcattatcttccgttactgccgttttgttttgtggcatcgcaggtatacagggcgaatagcactttccttacctatattgaaacggtgattgcgtcgttgaattttcgcggcaatgggctcgacgaatttatcgaagtggtgacattttatattataaaccgcttacgtcattaccgcgaagagcaggtttatgatgatattccacaatggctgaaagcaaccgtggagataatgcatgataaaacgcagtttggcgaacatgcgctggaaaatatggtgcgcctgtcggcaaaatcccaggagtatctgacgcgcgccacccgacgttattacagcaaaacgccgatgcaaatcattaatgagattcgcattaattttgccaagaaacagttggaaatgaccaactattcggttacggatattgcttatgaagccgggtatagcagtccaagtctgtttattaaaacgtttaagaagatgacctcatttacgccgaatagttatcggaagcgattgacggaaattaatgagtaacggtttgcattgctcgattaattacatttcacgcttgccccaatagcgcggggaacgtcacgctatttcttacgagcgggcatagcgtaatacatatcagtgttatacactgaagggagatattatgagccagaaattaaaagtcgtcactattggtggcgggagcagctacacccctgaattacttgaaggctttattaagcgctaccatgaattacctgtcaccgaattatggctggttgacgttgaagacgggaaagagaagctgggcattatttatgatctctgccagcgaatgattgataaagcaggcgttccgctaaaattgtataaaacgctggatcgccgggaagcgctgaaaggcgctaattttgtcactacccagctacgcgttggtcaactcaaagcccgtgagctggacgagcgtatcccgcttagccacggctatctggggcaagaaaccaacggcgctggcggtttatttaaagggttgcgtaccattccggttatttttgacatcattaaggatgttgaagaattatgtccgaatgcgtgggtcattaactttactaacccggcggggatggtgacggaagcggtttatcgtcataccaactttaaaaaattcatcggcgtatgtaatattcctgtcggcatgaaaatgtttattcatgacgtgctggcgctgaatgagaatgacgatctttccattgacctgtttggtctaaaccatatggtctttattaaagatgtgctggtgaatggcacctcacggttcgcagaattactggatggcgtggcgtccggtcagttgaaagcgtcaaccgtaaaaaatatctttgatctgccgtttagtgaaggattgattcgctcgctgaacatgctgccgtgctcttatttgttgtattacttcaagcaaaaagagatgttggcgattgaaatgggcgaatattacaaaggcggcgcgcgcgctcaggtcgtacagaaagtggagaaacaactcttcgacttgtacaaaaatcctgagctaaacgtgaagccgaaagagcttgagcaacgcggcggcgcttattattccgatgccgcttgtgaagtcattaacgctatttataatgacaagcagactgagcattacgttaatattccacatcatgggcatgtcgagaatatcccggcggactgggcggtggaaatgacctgcattctgggacgcaatggcgcgacgccgcacccgcgtatcacccgttttgacgaaaaagtgctggggcttatccacactattaaaggatttgaggtcgcggccagcaatgcggcgctgagcggaaactttaatgatgttctgctggcgcttaacctgagtccgctggtgcattccgaccgcgacgcagaagtcctggcgcgtgaactcattctggcgcatgaaaaatggctgcctaattttgccgcttgcatcgaagcgcttaaaggtaagcaccactgacagaggtaggctatggaacgcgtgttgattgtgaatgccgatgattttggcctgagtaaagggcaaaattacggcattgttgaagcatatcgcaacggcgttgtgacctccacgacggcgctggtcaatggcgaggctattgaccatgcggcgcagcttagccgcgagctgcctgcgcttggggtgggaatgcattttgttttgacgttaggcaaaccggtgtcagagatgccgggcctgacgcgagacggcctgttggggaaatggatctggcaaatggcggaggaggatacgcttccgctggatgaaattgcgcatgaactggcgtgtcagtatcagcgtttcatcgacgtatttggcagcgagccaacgcatctcgacagtcaccatcatgtgcatatgttcccgcaaattttccccatcgtcgcccgctttgcggcgcagcgcgggattgcgttacgtattgaccgccagacggtgttgaacgccgacgatctgccgtcggatttgcgcagcactcaaggatttagtagtgaattttacggcgaggagatcaccgaagcgtgctttttacgcattctggatgcctcggcgcatcgaggagaggcctcgctggaggtgatgtgtcatccggcgtttgtggacaacattattcgccagagcgcctattgttacccccgcttaactgaactggaggtgttgacgtctgcgtcactcaaggcagcgattgcggaacgtggatatcgtcctggcagttttcttgatatttagctcctgagtttgcggcgcaagaatgcgccgcattttttgctgtttatgcaggaatcgcgttaattttccccgcacgcgaccagacacggtgtgccgccatcagcgtcagcagagtgtccataaagtggtggtcaacgttatctgcctcaacaagtccttcttccccctggctatcaatgtttaaaagcgccttaaaccgtcgggcgtcgcctgccagtgcgatgggcttcagatgtttgtaggcttccagaaggtagtaacgggcatcgccgcaactctcgatatcggcaatattgccgcacggtactattaccgcatcgaccgttagcgacggcgcgccggcaaaggttgccgcaatcgttaatgttgaaccatcatcagccgttacttcacccatccgtgaatagagcagttttgcgtggacgcctttggcttttaaagcctgcaaaatggtcaacagttcggcggcgttaactttgtcgttcagcagaatagcgaccactcggcctttaacatcgccgtccggcaccgcatacaggctgagcgccggatcttttttcagaccgttgacatcaggaggcggggcaatttgcgtttgctcatgggtgagtgcaaaaccgagattatgcgcgacgccctgagccagcgtgacatcaatatgcgctaactgatcgaccacccgctcccgaatatacgcgcgggcgactttacccagttcaaagctgaacgcgtcaataatatgctgctgttctatcggcgtctgactgagccagaacaggcgaggatgcgagtaatattcaccgaaagaggggctgcgttcgcggattttattgccatccacgcgttcctggtatgattcgaagccgccgcgttttggcgctggcggcgtttcgcgtggccagttgtcattaatggagtttggttcatagttcgccggattggtgtcgatatccatccggtgcataccgtcacgctggaagttatggtaggggcaggtagggcggttaatcggaatttcgtggaagtttggcccgcccagacgactgatttgcgtgtcggtataagagaacagacgcccctgtaacagcggatcgttggtaaaatcaatgccgggaacaatatgtcctggatgaaatgccgcctgttcgttttcagcgaaaaagttatccggattacggtttaacaccattttgccgacgcgttgtactggcaccaactcttccggaatcagtttggtcggatcgagcagatcaaaatcgaatttaaattcatcctcttcggcaatgagttgtaggcccagctcgtattccgggaaatcgcccgcttcgatggcctcccacagatcccggcggtgaaaatccggatcgcgaccggtcagtttttgtgactcatcccataccagcgaggctttacctgccaacggtttccagtggaaacggacaaaggtcgctttcccttgtgcattgatcagacggaaggtgtgaatgccgaacccttccatcgtccgataactgcgtggaataccgcgatccgacattgcccacatgacgttgtgcagcgtctcaggctgtaaggaaacatagtcccagaaggtgtcgtgcgcactctgcccttgcggaatagcccaatgtggttcgggcttaacggcgtgcacaaaatccggaaacttatgcgcatcctggataaaaaagatcggcgtgttattaccgacgagatcgaaaattccctcttcggtataaaatttggtcgcaaaaccgcggatatcacgtacggtatcagcagaccccgcgccgccctgtactgtcgaaaagcgaacaaagaccggggtaattttctgtggatcgcacagaaacgcggctttcgtgatgtcgctcaggtctttatatggctggaaatagccgtgcgctgcagatccgcgggcgtgaacgatcctctccgggatgcgctcatggtcaaagtgggtaattttctcgcgcaggataaaatcttccaacagcgtagggccgcggctgccggcgcgaagagaattttgatcgtcggcgatgcgcacgccctgattggtggtcagcgcataattttcgctgcctttacgaaaggcgtcgagggcagtgagcttatcattcgcggtctcgggcgcttttaagctgccgggggccgtcggttgcgcgcccggcggcgtcgtttctggcgtggggcgatgtgaaccgtctgacggcgccagggagtccaggccgggctgtgattcacgggtatcatgcacgggggactgatggggggatttctcattatgcgacattgaactcgtctcctgctttcatcactgaaatgggcgtggtagtagtcaaaatcactctaactatagaacatttcagcaattatgctgggggagagcggaacggcagacagggtataacagggaaatcgcacgcgcggaacaggacgtcgggggagaagatcggctaaaatagtgtttttctgatttttagccttagagcctatcccagtaggcgttattggcgcagccagtttggacacggacagcgcgcaaaaaccggagcgtacacgtagtacgtgaggattttgagcactgcccaggaccaaaatggcaagtaaaatagccctaatgggataggctcttagcctcttttagtgaagcattaatgatgaaacctcttcgccagcaaaatcgccagattattagctatattccgcgtgttgaacccgcgccgccggaacatgcgataaaaatggatacgtttcgcgacgtctggatactgcgcggtaaatatgttgcctttgttctgacgggggagtcatttcaacggtcgcccgcctttagcgtgccagaatcggcgcaacgttgggcgaatcaggttcgccaggaaaacgaaatcgctgactaagaaaaaacaaaacgccggtactggagaccggcgtttttagtgacagacattttgagttgccgatcgtcatgtctcagacgatgtgaacgcccgataatgtattatcgatgcgccagttcagcgtcttcttcgctatcgagaatggttttatcggtctgcttcagccactggctggtcagcgtaccagcggtcattgagccactcacgttcagcgcggtacggcccatatcaatcaacggttcgacggagattaacagcgcgaccagcgtgaccggtaagcccatggcaggcagcacaatcagcgcggcgaaggtcgcgccgccgccaacgccggcaacacccgccgaacttacagtaacgatacccaccagcgtggctatccatacggggtctaaggggttgatgccgaccgtcggcgcaaccattaccgccaacatcgcaggataaagaccggcacaaccgttttggccgatggtcgcgccaaaagaggcagcaaagctggcgatggactccggcacgcccaggcggcgggtttgcgcttcgacattaagtggaatggaggcggcgctggagcggctggtaaaggcaaatgtcagcaccggccacaccttgcggaaatatttcagcgggctaatcccgttcacgcccaatagtatgccgtgaaccacaaacattatcgccagaccaagatatgacgctaccacgaagcttccaagcttaataatgtcctgcagattggagccggcaaccactttcgtcatcagcgccagtacgccgtaaggcgtaagttgcatcaccagacgcaccagcttcatcacccagctttgcagggtatcgatagcaacaagcacacgctcgccttttggcgcatcatctttcagcagtttaagcgcggccacgcccaggaatgcggcgaaaatcaccacgctgataatagacgtaggatttgcgccagtcagatccgcaaacggatttttcggtacaaaagacagcaccagttgcggcacgctgagatcggccactttgccgacatagctcgtctcaatggcattcagacgcgcggtttccgcgccgccctgaaccagaccttccgccgtcagtccgaacagattggtgaccagcacgcccaccagcgctgcgataagggtagtaaacagcagcgtgccgatagtcagaaaactgattttccccaattgagaggcgttatgcagtcgtgccacggcgcttaaaatagaggcgaataccagcggcatcacaatcatttgtagcaattgcacatagccgttgccgacaatattgaaccactgaatggagtcttttaacacctgactgtcagcgccataaatggtgtgcagggccagaccaaagaccacgcccatcacaaggccgacaagcacttttttagccagactccactgtttatgacgggcctgcgccagtacaaacagcagaatgacgaacaccgcaatgttcgcaattaatggaaaattcatccccgttctcctgatttttttattatgaagcgctgtgttttagcgattctgttcgcgcaagattagcagaactgtgagctggctcttatattcaaatggaatggtttataccaaaaatgattttggcgttgatttactaatcaatctggtgatttataaaacgattgaactgcatttgcaggatagtaatcatctgcgaagaccagcgtatgacgttgttttccggcatggactgtggcatccacaccgcccaggcaaacaacgccatgcataaaaatcgctccagttgattgcctttgcgcggcgccagaataggcaggcggaaacgccagcggcacggccacagtaagggaacgcctgcgggggtgagcatatccgcgacgatatggcttaaatagccaagtaccatgccttgcagcgcatccgccgggataatccacgtatccggtaccttgagataaaaggtcgccagtagggcaaagaccgccagcagactatgggtaaacccccggtgaccgaacgcgcgggcgatcggtttcgatacccatttcaggcgctgaccaagaaaagatttggggtggtcgatatccggcagcagacaggtcaaaatagccgaaggaataatatgccaccagtcgccgtgcgcaaggacgggcgttaactcggcattcttggcgaaaaccgcgctggctatagaaaaaagaagatgtccttccgccgtcatgataaaacccattaaactgtcaattcatacagtatagggtttttatacagtaggcggaagtggtgacgttgtaactctttgtctctgtcaaagccgcttgccgtctggctcagcggctaattgcccgttgactttgtttcggaaacatcttaaccgagtagatgcgccgccgtcagctctgtcagtgagttaagtttgacattcgccagcgcaaagcgcggatcaggctggttttcttctgctggcaccacaatggcgcgcattcgcgccgcctttgccgcgattaaaccattcaccgaatcctccagcgccacgcaggttaatggatcaacgcctaatttggccgcacaatccagatagacctgcgggtgcggtttgctgtagggcaatttttctgcagaagccagcgcgtcaaaactgtcgcgcagttcaaacatggtgagcactttttccagcatatgcagcggcgatgccgaggcaagccccactaatagcccctgcgctttacacagcgccacagcttcgcgcacacccggcaaaagagggcgcgtctcttcgataagcgtaatcgcgcgggcaataacacggtttgtcacttcctggcgatcggggccgttccacggttgctgcgcaaaccagagatcgacaaccatatcaatgcgtagcccaagcgtgtctggcagctcatggcgccgagtaatatctacgcctaaacttgccatcacgtccagttcagcgcgatcccagagcggttcggaatcgatcagtagtccatccatatcgaaaattgcagcaagaatttgacgtggggttgacatcacaacctctcctgttgagattaaaaaataacgaattaagcgttcattatgaccatgttcttagtatatcgcccttaaagatcaggcgaaaacgggaatcaacaggtagacttaggccaaaacgacgcgtctttatcaaggggaactcatgacgtatcaacaagctggacgcattgcaatcctaaaaagagttgttgggtgggttatttttattccggcactgctttccacgctcatctcagtccttaaatttatgtatgcgcacagtgaaaagcaggaggggataaatgcggtaatgctggattttacccacgtaatgatagacatgatgcgcgtgaatacgccgtttctgaatgttttttggtacaactcgccgacgccgaattttcagggaagcctgaatatcggtttctggctcatttttattctgatttttgtcgggctggcgatgcaggattccggcgccagaatgagccgccagtcacgttttttgcgtgaaggcgtggaagatcagttgatcctggaaaaagcaaaaggcgcggaagggctaacgcgtgagcagatagagtcacgtatcgtggtgccgcaccataccatctttttacagtttttcccgctctatattttgccggtcattattatcgtgctcggctactttttcttttccttgttaggcttcatgtaaactgaaaaatgccggatagcccgtatccggcatgggctgtacctataccgcaagcagccgatccatcgctttttgcgcagtagccaggtgctgaccgccaaacagccttgcccgattaagcagggtgtagagctggtaaatcggctgcctgtcgagaaaatccagcggtagcggcgaaacggactgatagccgtcataaatctgcggtggctgatcggtatgcagcggcagcatcgccagatcgcattctctgtcgccccaatagcaggctggatcgaagatataggggccgtcagggccaagcgcgcagttcgccgaccatagatcgccatgcaaaagagaaggctgcggttgatgcgacgccagacgttgctgaacatgttcaacaatggcgtcaatattaccaaaagtaatgcctttttccgcagcgagttcaagctgccagccaatgcgctgttcggcgaaaaaagtcgaccaacggcgttgccaggtattcggctgcggcgtggtagagagcgcgttatcaaaatcgaggccgaattgaggttggtcgctccattggtgcaggcgcgccagctgttgcccaagaataaacgcattatgggcatccagcgggcggggcgagaggtagtccatgactaaaaagctgtaatcccgatccgaacctaccgcccataccttaggcacaacaacggttttactgcgggagagcagctccagctgatcggcttctgcggtaaaaccgcggagcatttctcgttcatcgcacttcacgaaaaaatcatggcctgcataacgtaaatgccatgcggcatgaacttctccgcctggcagttcattacgcagttcgatttcgccttcaccgacttgctcgcttaaaagacgactgatagcttgccacataatgtctctccccacgttgtctgccagatcataaggttagtgcaaaaatgcggttgaaaaatacgaactaacgcacatcgcggacgcgccgcggcgggaatggcacttattgtgcgtttttactccacgcctcccaggtcgccacggtaatgtcgacatccttatctaacgcgcttttcgcaagtccggcgacaagcgctttgatttcatcagcgctctgagcgctaacaaagccaaacgtattggtgccgagctcatgcacatccccttcatcgtccgttaatgtcagcaaaaaaccgctacgcgtcagatggttattgagttcgttaatctcggtcagggaatcttcatggaaggttacggtaataacataacgggtaatatcgccactggccatcgttcacctcgttgggagcaactgtgtttttaacagcggcggatgcgccgcccgttaaccgattttccgttatccccctcggcgagggggaaacgattattgcgcggaaagataggcgtatattttttgggtatcgtcacgagaacacagacgcgtaccttgattgagcgtagcagcgctgcctgccgccacaccgaagcgcaccatctcttccagcgacgcgtcttgcgccagttttaacgtcatcgcgcctaccatactgtcgcctgcgccaacagtactttgacttttcaccgggggaggaacaacctggatgcaattctcactgtctatgcccagcgccccttgcggccccagagagaccactacccggcgagccttgccgctttgcactaattcctgggccgctttacgcacatcatcaggctgcgtcagatcacgattaaccaacgcgctcaattctttcaggttcggtttcaccagttcgatatcgccaagcgccagcgcggcggtgagcgcgtcgccagagctatcaataatgcagcgaatgccttgcttctgcgcggcggaaatcagttgcgtgagtttctcgaccttaacgccgggcggaaggctgccgctgataaccagaattgccccggattcaatttccagtacctgttcttcaagctggcgaaattcgtcatcgtccagcgtggcgccgggcataacaaaacgatactgttcgccgctggactcgacgtggacgtgcaggttctgacgcgtccagtccttcgcatcgacggtagacacggggacattttcgtcagccagtagtgcgacaagatgttcgccggtagcgccgccagccgggaaaatggcggtcgcggtgccgccaagatgcgcaatggcgcgagcgacattaatacccccgccgccgggttcgaataccggcgcggagcaccgcagtttaccttcgggataaatttgcggcgtgattgttgcgctatcgagagagggcgcaagcgtcaacgtatagatacgtaccatcgttacctcctgttaggctgatttcagtctggcacttaatccccggaaagtgaaggaattaacaatatgattttccggatctttatttaaagaagtgcgatgtaaagttatataaataaatgaatgcttcgggagggttcttattcaaaaaatgaaatagtaattgattgctatgttattcggggcttcttataattcgctacctttccaggggcgtttgtcattgatccctatgaaagtttccgggaccgtcgtggtctcttttttagttgtacggactctatataaatgaagcttttgaaggcagtacccgctgtagttatgctggcgggtggcgtgttcgcgtctctgtatgccgccgccgatgattccgtttttactgtcatggatgatccctccaccgcgaaaaaaccttttgaaggtaatctgaatgcgggctaccttgctcagtcaggcaatactaaaagctcttccttaacggctgacacggcgatgacctggtatggacaacgtaccgcctggtcattatggggcaatgccagcaatacctcctctaatgatgaacgctcttcagaaaaatatgcggtaggcgcacgtaaccgttttaatatgacggattatgattatacctttggccaggccagttggctgacagaccgtttcaacggttatcgtcagcgcgacgtactgaccgccggttacgggcggcagttccttaatggtccagtgcacagcttccgttttgaattcggtcctggggttcgctatgacgaacatacggacgataccactgaaacgcagccgttgggttatgcttccggcagctatgcctggcagttaactgacaatgctaagtttacacagggggtgtcagtatttggcgcagaagacaccacactaaattcggaaacagccctcaatgtcgccattaacgaacattttggtctaaaggtggggtataatttaacgtggaactcgcagccgcctgaatctgcgcctgaacataccgatcgtcgcactacggtaacgctgggctataagatgtaatattgtaccgggttacgttacgtaacccggttattccgtggtgacgcctcagaagaagaaggtgatgtctccgttgatataagaatagtcgtctccggtgcgaaattccgacgtgactttgtttaaagaaagagaaaatgcgacgggagaatagccgatggtggcaccgacgcgatattcatccacggttttattaatatccaccgtttccatttttgtttgcagcgttttcccctgtaacgtgtagtttttatcaacttccctgcgctcaacgccagcaaatactttatagatcaatccctctttttgagtgtgtattaaccctcggcgggacagtaacccaaacccattatcagagttgaaggtcttatcatttcccagcgcaacggttgcgccgtaccccaaatactggaagagattgccgccgacagcagatacttctggatagaagcccacattgacgcccagaatatcaatagctggcgtaagggacaccattccttttgccgtgtaaccataacggttttcaatttgatcctgccaggcagggtatttttctgcgcctattattcgatgcgcccgattctgaacctcctgaccgcctgcgtcaggaccaataacgccaatatcggtacctaaacgataacgtaaccaattggtggctaatgaattccactccagtccggtatgaagaaaggcgctgaacgcgcggtcgcctttgacggcttcaggctttctcttattggcgcctgatggagaataaatatcttgcgcgatatgaaaagagagttgactggcgtcagtgagatcgtggctgtagcctaaaaagagcccggcagtataatcaccccggtctgcagccgggtgcccataaagggcatttaaggatggttgaaatatacctgcatcatcattcgccactgaaatagcaaggctactggcattggccattgtggtcgtactgagtatggcggcaatcatcgttgcgcaatagctgtatttgttcactttttacccctgaatatgaaagtgaatactcttatttttacaaagtaataagcacagcagcatgatgcgcagtgcctattaaacctttaaatataactaaactcctgccagcagcgagtcattgagaggatacgttgccttaatgttgaaaaatggtgttgaaaaacatgcgtcagatattattgaatatccatttttcattcgctatctgagtgcgagaaattattggcttcacgattatgcatataatacgatgttttttggtatcaatatgaatatcacgttgtattcttttgagctcattttctatgatggcttcgatgtttatctgttattaatttttaccgtgatagtgttgtctttaatgatgagaatatctaacggctgtcagggtaatataaccaaattattgctatctgaattattagggcagttattattaaggaagaaaaagtgaacaagaccattaatttgctaaaattactgcccgtagtattattaagcgcatgtactacatcgtatcctccccaggatacaacatcggcacccgagttaccccatcgtaacgtactcgttcagcaacctgataactgtagcgttggctgtcctcaaggaggaagccaacaaacaatctatcgccatgtctatacgctcaataataatagcgtcacgaaatttgccaactgggttgcctatagcgtgacaaaaaccagccaggcaagcggtcgcccgcggaactgggcgcaggaccccgatttaccgccctcggatacgttggccccttccgcctataaaaatgcccatacgctattaaaagtcgacagggggcaccaggcgccgttggcaggattgggcggcgtatcggactggccgtcgttaaattatttatcgaatattacgccgcagaaatccgccctgaatcagggagcatgggctgcactggaaaaccgggtgcgcgaacttgccaaacaggctgatgtatctgtagtgcacgtagtgaccggccccctttttgagcggcatatcgccacattgccagaagatgcgacggtagaaattcccagcgggtactggaaggttttattcaccggaatggcgccgtcaaaaagtgaaggaaattacgctgcatttattatggatcagaatacgccccgttcggcgaatttttgcgactatcaggttaccgtggaggctatcgaacataaagcgaagccagtgctgacgctgtggtctgctttgcctgaagcggtagccagcgaggtgaaaacgacaaaggggagtctggcgcagaagttaggttgtcgatgagaagcgctatacggcgcgtagaaagataacggagaaaccctgtcaagggtcttgatttgctatagagtgatgcaatctccctttttttagtgttaccatcatcatgccggacgaagatagcgattttcgtctgtgtcgaaggttgtgcgccaatttagcaatggttggctagatggatacacaactcactgtcaataaattcattttctctttgtatgtgatcttgcgtaataagtacaatccttcattcacatccattctcgttcgtttaaacctgtttcaccagttccgcgtcattactggtaatagcggatatatatgtttcataccgttttacattgatccctttcgcgccgtaagatgtacgtacctaatctaacttaagcagggaactgtcattcataacacagagtttattggtatcaatggtagattatattacggtgacaatctcgggatgatccgcatatgagtagatgtggattagggcggagtagcggtaggactaataataaccggcggcgagaaatacataattgaggggctattcataaatcatcatctagaaacgcaagcactatcatgaatatatcataagtaatttacgttggtaatgatggctcagcaaacccaacaagctttacaggaacaatttttacgcttcagagccaaataaaacggcggcattgccgccgtataacttatttattgtttcttagtaaaacgaatcttatatgctctgaaaaaacaaaggaagatgcaatgtataccataaaagcaatcatcaaatgctcagggaacaaccatcccatgctaacaggaatcacacttattccaatgcaaaataggaacattatgaaataatgcgctgactttgtttcctgagttttattggagaaatacttagctaggacgcctttaaatactccagatataactaaccaaactggtgtaaaaagcccgaaatctgcgtatagttcaccatacccgaaagcaggagcgccctgatttctgtagaatgcatcagggaaaaatacttttgccagatacaatgcgccaaaatcttcaggcttatcaggccaaatagccctcggaatcctcgagtaaacctcgctttccattagtaattttccgtacataaagtcaaagtttgaggaagcaacaagaacagcattacgggtataatccgagtaattcgccatattttctatcggattcccatcagtaaacgtatatgcaaagaatgccgttacaatgactgctataacagcaaacgattttaccaggaacataaatttaatttttttattttcaatatatgaaaggtaaaggatgaatgctataaatatactaaatattggtcctttgttaccatgcaagaaaataagtatacagttaaataaaactatggaaatacaaaataactttgattttttgtatgtaaagaacgcgcaaatagaagcgacaagagaaaacattaatgaaggatagaagtatataccataccctgttctggttaattcgtatattcttcttgggctaagtatatactctctgaactccatcaacactggaaggtaaatgataaaagcaaggaaggtgaataacaatgaagtaaacacataccttggtttatttttcgtgtttgatttgttgtatatgggttttctttgtgtgtaaagataagaaataacaaatgatgctatgtatgttatatagcaagtatagaaaaacaaatattccactgtataattccgcacctctgagaggtatacaaatataccttcaaacacgtacagtgtagggactgttattatcaggtatgggaccattacatttattattttcccctcaattcttacggaaagagtatagagataaactataaataataagcataatgcaatgtatgaaattataagcatatagagcctttagaaaaaatgcttagtattaaaaatattaccatcaggcaaataaggtgtggtacggaaaatcttctggcaagatattctgaatctggtagtctataatcattactcatcactatcttcccgatatcaaaaccgtgttattgacatattaacactcattaacactcctatctactgcgcctccgatagcatgaagctatcaagcatttgcagcacaaacatcaaacaatgtaaatgcttttgataattacacatgattgttactgtgtttatatacagtggcattcgaagattcatcatgaggttcccgagtcctgtaaaagactatacagagaaagagctatcactcgacgagtaattcatctcacatcgtgccgcgacatacttcaagcaacacagacgaattacaagtacggcatcataagtgagacgttgctagttatagaagcttcatagcagcatgtaatggctctttgctggtatgtgctttggaaagtgggtttcgtattgtgcgttatcgcatgctgccaggtccccatctggagaatatagatagcggtcgtcgtgaaaagctatctgatgtgaatgcctcatacggtggcagtaagccgagactcagagtgaccatgtacatcattaacgatacgcgtgccgggtagtgtgttgggattcaggttctgtagaacagaaagatgcaatctccctttttttagtgttaccatcatcatgccggacgaaaatagcgattttcgtctgtgtcgaaggttgtgcgccaatttagcaatggttggctagatggatacacaactcactgtcaataaattcattttctctttgtatgtgatcttgcgtatgggtcaccactgcaaataaggatataacatgcctgttattactcttcctgatggcagccaacgccattatgaccaccctgtaagcccgatggatgttgctctggacattggtcctggcctggcgaaagccaccattgcgggccgtgtgaatggcgagctggttgatgcttccgatctgattgaaaatgatgcgacgctttccatcatcaccgcaaaagatgaagagggtctggagatcattcgtcactcttgtgcgcatctgttaggtcacgctatcaagcaactttggccgcacacgaaaatggcgatcggcccggttgtcgacaacggtttttactatgacgttgatcttgaccgcacgctaactcaggaagatgtcgaagcgctcgaaaagcggatgcatgagctcgccgagaaaaattacgacgttatcaagaaaaaggtgagctggcatgacgcgcgcgaaaccttcgtgaagcgcggcgagacttacaaagtcgctattcttgatgaaaatatcgcccatgatgataagccaggcttgtaccatcatgaagaatatgtcgacatgtgtcgtggtccgcacgtgccgaatatgcgtttctgccatcactttaaactgatgaaaactgccggcgcatactggcgcggtgacagcaataataagatgttgcagcgtatttacggtacggcatgggcagataaaaaagccctgaacgcttatctgcagcgcctggaagaggccgcaaaacgcgaccatcgtaaaattggtaagcagctcgacctgtatcatatgcaggaagaagcgccgggcatggtgttctggcataacgacggctggactatcttccgcgagctggaggtctttgttcgttctaaactcaaagaataccagtatcaagaagttaaaggcccgttcatgatggaccgtgtgctgtgggaaaaaaccgggcactgggacaactataaagatgcgatgttcaccacatcctcagaaaaccgcgaatattgcatcaagccgatgaactgcccgggccacgttcagatctttaaccagggtctgaaatcctatcgtgatttgccgctgcgtatggcggaattcggtagctgccaccgtaacgagccatcaggcgcgctgcatggtctgatgcgcgtacgcggctttacgcaggatgatgcgcatatcttctgcaccgaagagcagatccgcgatgaagttaacgcttgtattcgtatggtctacgatatgtacagcacctttggcttcgagaagatcgtcgtcaagctttccactcgtcctgataagcgtatcggcagcgatgagatgtgggatcgtgctgaggcggatctggcggttgcgctggaagaaaataatatcccgtttgagtatcaactgggtgaaggcgcattctacggtccgaaaattgaatttaccttatatgactgcctcgatcgtgcatggcagtgcggtacagtacagctggacttctccttaccgtctcgtctgagcgcctcctatgtaggcgaagacaacgagcgtaaggtgccggtaatgattcaccgtgcgattcttgggtcgatggaacgcttcatcggtatcctgaccgaagagttcgctggtttcttcccgacatggctcgcgcctgttcaggtagtcgtgatgaatattaccgattcgcagtctgaatacgttaacgaattgacgcagaaactacaaaatgcgggcattcgtgtaaaagcagacttgagaaatgagaagattggctttaaaatccgcgagcacactttacgtcgtgtcccttatatgttggtctgtggtgataaagaggtggaagcaggcaaagttgccgttcgcacccgccgcggtaaagacctgggcagtctggacgtaaatgacgtgattgagaagctgcaacaagagattcgcagccgcagtcttcaacaactggaggaataaagtattaaaggcggaaaacgagttcaaacggcgcgtccgaatcgtattaatagcgaaattcgcgcgcaagaagttcgcttaacaggtctggaaggcgagcagcttggtattgtgagtctgagagaagctctggaaaaagctgaagaagccggagtagacttagtcgaaatcagccctaacgccgagccgccggtttgtcgtataatggattacggcaaattcctctatgaaaagagtaagtcttctaaggaacagaagaaaaagcaaaaagttatccaggtgaaggaaattaaattccgtcctgggacagatgaaggcgactatcaggtaaaactccgcagcctgattcgctttctcgaagagggcgataaggccaaaatcacgctgcgtttccgcggtcgtgaaatggcccaccagcaaatcggtatggaagtgcttaatcgcgtgaaagacgatttgcaagaactggcagtggtcgaatccttcccaacgaagatcgaaggccgtcagatgatcatggtgcttgctcctaagaagaaacagtaaggccttcaagtaacaattctgtgaagccttcgggcttcacaggctttgttcgcctatgtttcgtttattaacaatgcgaagtggaagttattaaaatgccaaaaattaagaccgtacgcggtgctgctaagcgcttcaaaaaaaccggtaaaggtggttttaagcacaagcacgctaacctgcgtcacattctgaccaaaaaagcgactaaacgtaaacgtcacctgcgtccgaaagccatggtttctaaaggcgatctgggcctggttatcgcgtgcctgccgtacgcataagccgttaacgtttttaactttttaattagaatagatacaggagagcacatatggctcgcgtaaaacgtggtgtaattgcacgcgcacgtcacaagaaaattttgaaacaagccaaaggctactacggtgcgcgttctcgcgtataccgcgttgccttccaggcagttatcaaagctggtcagtatgcttaccgtgaccgtcgtcaacgtaagcgtcagttccgtcaactgtggattgcgcgtatcaacgcagcagcacgtcagaacggtatttcttacagcaaattcatcaacggcctgaaaaaagcctctgttgaaatcgaccgtaagatcctggctgatatcgccgtattcgacaaagtcgcgttcaccgcgctggttgaaaaagcgaaagcagctctggcataagccagtgaaaagagggagcctggctccctctcttttatttactgttcagtgagttgacaattgacctgtaacccttttcaataaaggatattcggttttaccacataaggtaacgcaagcatgaacgctgctattttccgtttctttttttactttagcacctgatcccaggaggctagcgcgtgaaaaacgaaacgaaaaacagcgcaaaaaagcctcctgatggaggctttttttgtatctgaaatcgagagattacgtccaatgaaccggtgtcttcaccgacacaatgaggaaaaccatgtcacatctcgcagagctggttgccaatgcagcggccgccattaaccaggcgtcagatgttgccgcgttagacaatgtacgcgtcgaatatttgggcaagaaagggcatttaacccttcagatgacgaccctacgcgatctgccgccggaagagcgtccggcagccggggcagtcattaacgccgcgaaagagcaggtacaacaggcgcttaacgcgcgtaaagccgagctggaaagcgcagcgcttaacgcccgtctggccgctgagaccatcgatatctccctgccggggcgccgtattgagaacggtggtctgcatccggtcacgcgtaccattgaccgtattgaaagtttcttcggcgagcttggttttaccgtggcgactggcccggaaattgaagatgactaccataacttcgatgcgttaaacattccgggtcatcacccggcccgcgccgatcatgataccttctggtttgacgcgacccgtctgctgcgtacccagacgtctggcgtccagatccggacgatgaaagcgcagcaaccgccgatccgtattattgcgccgggccgtgtataccgtaatgactacgaccagacgcatactccgatgttccatcagatggaaggtctgattgttgataccaacatcagcttcaccaacctcaaaggtacgctgcacgacttcctgcgtaatttctttgaggaggatctgcagattcgcttccgtccttcttattttccgttcaccgaaccttctgcggaagtggatgtgatgggtaaaaacggcaaatggctggaagtgctgggctgcgggatggtgcatccgaatgtgctgcgtaatgtcggtatcgatccggaaatctattctggcttcgcttttggtatggggatggaacgtctgaccatgttgcgttacggcgtcaccgacctgcgttcattcttcgaaaacgatctgcgtttccttaaacagtttaaataaaggcaggataaaacaatgaaattcagcgaactgtggttacgcgagtgggttaacccggcaattgatagcgatgcgttggctaaccagattacgatggctggcctggaagtagacggcgttgagccggtcgcgggaagcttcaatggcgttgtggttggggaagtggttgagtgcgcccagcatccgaacgctgacaaattgcgtgtaacgaaagtcaacgtcggcggagaacgcctgttggatatcgtctgcggcgcgccaaactgtcgtcaggggctgaaagtagcggtggccaccattggcgctattctgccgggcgatttcaaaattaaagcggcaaaactgcgtggcgaaccgtctgaagggatgctgtgctccttctccgaactggggatttccgacgatcacagcggcattatcgaactgccggcggatgcgccgctgggtaccgatatccgtgaatacctgaagcttgacgacaataccatcgaaattagcgtcacgccgaaccgtgcggattgcttaggtatcatcggcgttgcgcgcgatgtggcggtactgaacaaagcgccgctccaggagcctgaaatggcgccggttacggcaaccatcagcgatacgctgccgattacggtagaggccgctgatgcgtgtcctcgctatctgggccgggtggtaaaaggcattaatgttaacgcgccgacgccgctgtggatgaaagagaaactgcgtcgctgcggtattcgctccatcgatgcggtggttgacgtcacgaactatgtgctgctcgaactgggtcagccaatgcatgctttcgataaagatcgcattgatggcggtattgtcgtgcggatggcaaaagagggtgaaaccgtcgtcctgctggacggtagcgaagcgacgttaaatgcggacacgctggtgatcgccgatcaccataaggcgctggggatagccggtatttttggcggcgaacattccggcgtgaacggcgaaacgcaaaatgtgctgctggaatgtgcgtactttaatccgctgtctatcaccggtcgcgctcgccgccacggtctgcataccgatgcgtctcaccgctacgagcgcggggtggacccggcgctgcaatataaagcgatagagcgcgctactcgtctgcttcttgatatctgtggcggtgatgcgggtccgataattgatgtgagcaacgaagcaacgttgccgaaacgcgccaccattacgctgcgtcgcagtaaactggatcgcctgatcgggcatcatattgcggatgagcaggtcagtgatattctgcgtcgtctgggctgtgaagtgaccgaagggcaggacgagtggaaagccgtagcgccgacctggcgtttcgatatggagattgaagaagatctggtggaagaggtggcccgcgtttacggctataacaatattccggacgagccaattcaggccggtttaatcatggagacgcaccgtgaagccgatctgtcgttgaagcgggttaaaaccatgctgaacgacaaaggctatcaggaagtgattacctatagctttgtcgatcctaaagtacaacagctcatccatccaggcgcagaagcgctgctgctgccaaaccctatctccgttgagatgtcggcgatgcgtctgtctctgtggagcggattgttggcgacggtggtctataaccaaaaccgtcagcagaatcgcgtgcgtatttttgaaaccggtttacgtttcgttccggatacacaagccaatctgggtattcgacaggatctgatgctggctggcgtgatttgcggtaaccgctatgatgagcactggaacctggcaaaagagaccgttgatttctatgatttgaaaggcgatctggaagcagtactggatttaaccggcaaactgggtgatatccagtttaaggcggagatgaatccggctctgcatccgggacagtctgcggcgatttatctgaaagatgaacgtattggttttattggggttgttcaccctgaactggaacgtaaactggatctgaatggtcgtacgctggtgtttgaactggaatggaataagctcgcagaccgtatcgtgccgcaggcgcgggagatttcacgcttcccggccaaccgtcgcgatattgcggttgttgttgcagaaaacgttcccgcagcggatattttatccgaatgtaagaaagttggcgtaaatcaggtagttggcgtaaacttatttgacgtgtaccgcggtaagggtgttgcggagggttataagagcctcgctatcagcctgatccttcaggataccaaccgtacactcgaagaagaggagattgccgctaccgtcgccaaatgtgtagaggcattaaaagagcgattccaggcatcattgagggattgaacctatggcgcttacaaaagctgaaatgtcagaatatctgtttgataagcttgggcttagcaagcgggatgccaaagaactggttgaactgtttttcgaagagatccgtcgtgctctggaaaacggtgagcaggtgaaactctctggttttggtaacttcgatctgcgtgataaaaatcaacgtccggggcgtaacccgaaaacgggtgaagatattcctattacagcacggcgcgtggtgaccttcagacccgggcagaagttaaagagccgggtcgaaaacgcttcgcccaaagaagagtaatcagatccaggcataacatccatcagggtgtattgcggcagatacgctgccatcccgaaagtagatcagcgggatgacagcgtatttgtcagcctgaaagatgacccgtataactaaaaaggccgcattgcggccttttttctttcaagtaaaggatacccaccgtaaaatcacgctacctcttttcagctgaatggataacatgctgacttttgcccgccaacaacagcgacgaaacgttcgctggcttctgagcctgtcactgctggtgctactggctacacttctgagcttatgcgcaggcgaacagtggattgcccccggtgactggttaagcgcccggggggaactgtttgtctggcaaattcgccttccccgcacgcttgcggtattgctggttggcgctgcgctggcgctatctggcgctgtgatgcaggcgctgtttgaaaacccacttgctgaaccgggtctgctcggcgtttcgaatggggccggtgttgggcttattgccgccgtcttactggggcaggggcaactgccaggatgggcgctgggactgtgcgctatagccggcgcgctcattattacgttaattctgctgcgttttgcgcgccgccatctctctaccagccgcttgttgttggcgggcgtcgcgctgggcattatctgtagcgcgctgatgacgtgggctatctatttttccacctctttcgatctgcggcaattaatgtactggatgatgggaggatttggcggcgttgactggcagcagagctggctaatgattgcgctcatcccggtactgatctggatatgttgccagtcgcaaccgctgaatatgctggcgctaggggaaacctcggcgcggcagcttggcctgccgctgtggttctggcgcaatttgttggtcgtcgccaccggctggatggtgggcgtcagcgtggcgatggcgggggcgattggttttatcggtctggttattccgcacatcctgcgcttatgtggtttaaccgatcaccgggttttacttcccggctgcgcgctggccggggctatcgccctgctattggctgatgtggtcgcccgactggcactggcgtcggctgaactgcctatcggggtggtcaccgccacattgggggcgccagtgtttatctggctgctactcaaatccgcgcgttagcgcatcggtaaacaactgctttcatcattcgcagtctatgattaaaggctaacgatgaaacccgctattctaccgacatcagggagacaccatgcaaaactcgcttcttaatactcacgttacgacgattgatggagaggtcactacacttgaaaaatacgccggaaaagtgctgctcattgtaaacgtcgcctccagatgtggcctgacgccgcaatatgaacagttggaaaatatccaaaaggcgtgggcagatcaggggtttgtcgtgttgggttttccctgcaaccagtttatggggcaggagccaggcagcgaagaggagattaaaacctattgtgccagcacctggggcgtcacgttcccgatgttcagtaaaattgatgtgaatggcgacgcgcgccatccgctgtatcaaaaactgatagccgctgcgccaacggcagtcgcgccggagaagagcggcttttacgaacggatggtaagcaaagggcgtacgccactctatccggatgatattctgtggaattttgaaaaatttttggtaggccgggatggtcaggtggtacagcgtttttcgccggatatgacgcctgaagatcctattgtgatggaaagcataaaaatcgcgttggcaaaataatgtctcaattgatgcaattaaaggatgtcgccgagagcacccgcctggggccgttttccggcgaagtaagcgcaggagagatccttcatcttgtcgggccgaacggtgccgggaaaagcacgctactggcgcgtatggcggggttaacctccggcgaggggagcatcaggtttggcggagcgccgctggaggcatgggcgacggcaacgcttgcccaacaccgcgcttatcttgcgcaacagcaaaatccgccgttcgccatgccggtctggcattacctgacattgcatcaacctgataaaacgcgaaccgggcagcttaacgaggtggccgatatgcttggattgggcgacaaactggggcgaagcgtgaatcagctttccggtggcgagtggcagcgtgttcgccttgctgccgttgtactacaaattcatcccgacgctaatccggtcggtcaattattgctgcttgatgagccgatgaacagtctcgatgttgcgcaacaaaacgctctggatcgggtattacatcatttatgtcaggcaggaattgcgattgtgatgagtagccacgatctgaaccacacgctgcgccatgcgcataaagcctggttactaaagcgcggtaaactcattgcctgcggccgccgggaagaggtgctcaccccctcttatctggcgcaagcctacggtttgcgctttcgacgactcgacgtcgaggggcatccaatgctcatttcggccacttaagtaaaatcgtttcttgaaaagcaggtaatttcgacgctaaattaataccaaaataaaaacagaggattgttgcggcatgcgtttttggcttcttgttatcacagcattgttcctggcaggatgcagtactcatcgggcaccggcgccaaatgccagattatcagactccattaccgtcattgcgggtctgaacgatcagttgcagtcctggcgcggtacgccataccgttacggcggcatgagtcgcagaggcgtggactgttccggctttgtggtagtcactatgcgcgacaagtttgatttgcagttgcctcgtgatacgcgtgaacaatcaaaaatcggcaccagaatcgataaagatgaattgctgcccggagatttggttttctttaaaaccggttcgggcgaaagtggtttacatgttggtatttacgatacaaataatgagtttattcatgcctctaccagtcgtggcgtgatgcgttcatcgctggataatgtgtactggcgaaaaaacttctggcaggcacggcgaatttaacctcgcagacgatataaattttatagtctatttttaacatatcgccggttgaacttatgacatctgttgtcatcatatataatgatataaccgtagcatttacaaacgtacttttattaaaaacgggcgtgttcacgccctgtgaaaagtacaagattgaatattggtttataatcagagtaagttaaaaaaaggaaccggttcaccggtaaacaagaaaaatgatgacgcttcaattagtatctgaagttacgtctgtttccgtccgtagtgactggatggcgaatagcgccctaaccatgggactggcgtaatgattgcttcacttgatgagctttaccattccgaactctttttccttcccgtcatggatgaaaacgctcggcttgttggtttagagattattgcaacgtttgccgctgaagacggcgccgtgcggatgccgactgagttggtagcgcctcgcctttcggtggaggaacaatactgtctgtttgttgaaaaactggcgttgttagaaacctgtcagcacttttttattcagcataaacttattgcatggcttaatttaccgcctgcaattagtgacttattattattagatagcgaacttttttcccgggcagcgcgctttccgtttcttaaattagctataaatgagaattatcctgggttaaaccagggcaaaaacaatgaaacgttagctaatctggcaatgcatttcccattaatgctggcaaattttggggcaggcgaggcgtcgactaaagctattttcgatgggcttttcaaacgagtcatgttggataaaaattttattcagcagcgagctgaaatgatctcattcgaaccattcatgcacgctattgttgcccagatctcctccagctgcgagtcgctgatgattgccggtattgatactgaggcgatgtttgcgcgcgcagcgccattggggtttagcgcattccagggcggactatggcctccggtgccggtaagccagctcattaaactcgttcagcgataacctttctgtttgccggtgtttaaccggtgattaaccgtctacactgaagacaggaggccctatgaccctgtcttttactgcccgttggcgcgatgaattgccagcaacgtataccgcgcttttacccacaccgttaaaaaatgcgcgactgatttggtataacgacgaactggcgcagcagttagccattcccgcttcgttatttgatgctaccaatggcgctggcgtttggggcggcgaaaccttattacccggtatgtcgcctgtcgcgcaggtatatagcgggcatcagttcggcgtctgggcgggacaactcggcgacggacgcggtattttgctgggcgaacagctcctggcggatggctcgacgctcgactggcatctgaaaggcgccggattaacaccctattcgcgaatgggggatggacgcgccgtcctgcgttcaaccatacgagaaagccttgccagcgaagccatgcattatctgggtattcccactacgcgcgcgttatctatcgtaaccagcgatacgccggttcagcgagagacgcaggaaacgggcgcgatgttaatgcgtctggcgcaaagtcatatgcgttttggtcatttcgaacatttctactaccgccgtgagccggaaaaagttcagcaactggctgatttcgctattcgtcattactggccgcaatggcaggatgtcccggaaaaatatgctttgtggtttgaagaggtggcggcgcgtaccggaagactcatcgccgagtggcaaaccgtcggttttgcgcacggcgttatgaatacggataacatgtcgattctggggctgaccatcgactatggtccctttggttttctcgatgactacgatcccggcttcattggtaaccattccgatcatcagggacgttaccgcttcgataatcaaccgtcggtggcgctgtggaatttacaacgtctggcgcagacgttaatcccttttattgagatcgacgcgttaaacagagcgctggatcgttaccaggacgcgttgttaacgcactatgggcagcgaatgcgccagaagctgggcttctttaccgagcaaaaagacgataacgttttactgaatgaattgtttagtctgatggcgcgcgaagggagtgattatacccgtacatttcggatgttaagccatacggagcaacagagcgcctcctcgccgttgcgggatacgtttatcgatcgcgcggcgtttgatgcctggttcgatcgctaccgggcgcgattgcgcacagaggcggtggatgacgcgctgcgccagcagcagatgcaacgcgtgaatcctgcgattgtgttgcgcaactggctggcgcaacgcgcgatagatgcggctgaacagggagacatggcggaactgcatcggttgcatgaagttttacgtcaaccttttaccgatcgagatgatgactatgcccgccgaccaccggagtggggaaagcggctggaggtcagttgttcaagttagcctgatgccagcagcatcgtctgctggcggagcgctatttggttaacagtagcttcccggcctgagttttgcgcaacagatactcctgaccgttgtgatcgataatgactttgccgtccggacctaatagcgcctgactgttgacgcgccgttcagcggcagggagaagcgtttcattgtctatttccttagggtgaggcagctcggtgttatccatacgcgacatgctatttattaataatcaaactcacaatgattattattatcaataattaatgcgataacagcaagtgctaattctgcggagtgatatacgcgcgcggagagaaaagggcgggtaacgcatcgaagaaacgcccatcccggcaggatgggcgagctattaaaagcggctgtctaccgccgcggcaagtttttccaacaaaacttccgtatcttcccagttcaggcaaggatcggtaatggactgaccatagattaatggttgaccgctgataattttttgcgtgccttcccgtaaaaaactctctgccataatcccggcaattgccgtggagccattacgaatctgctggcaaatatcatcacatacctctaactggcggcgatgctgtttttgacagttgccgtggctgaagtcgacgaccagatgttccggcagatcaaattcatgcaacgtatcgcaggcggcggcaatatcttcagcgtggtagttcggttttttaccgccgcgcatgatgatgtgcccatacgggttgccactcgtctggtagatagtcatctgtccgtctttatccggcgagagaaacatatgactggcgcgggaggcgcgaatagcatcaacggcaatgcgggtattgccatccgtaccatttttaaagccgaccggacaagagagcgcagaagccatttcccgatggatttggctttcggtggtacgcgcgccaatcgctccccaactgatcagatcggcaataaactggccggtgaccatatcaagaaactctgtggcggtcggtactcccagttcgttcacctgcaatagcaagcgacgcgccagttcaagcccataattgacgcggtaactgccattcaagtcgggatcggaaatcaggcctttccatcccacgacggtgcgcggtttttcaaaataggtgcgcatgacgatctccagacgcgcctgatgcttttggcgttgtgcctggagctgcgtcgcgtattccatggcagcattcagatcgtgaatcgaacaggggccaatgacgaccagtagccgtggatcttcaccatttaaaatcttttctatccggcgtcgggagtcggtaacgtgactggcgacggaggacgatacaggataccgctgcgcgagttcggtcggtgttaccaggctgtcgatacgcgcagtacggagttcgtcggttctgttcattacaagtctcagaaatttgttgcttcaacggcaggactaccgggaagtgatgggcatcacgataaaccaatccctgctgatttcaagtgcgaggcgtgtcacacctcgcaggcagaacggcatgataacaaaaaccaacccattaaactagtttgctagtacatcctgcggttaagccccataatatcgagaatcttggtggctatctcttcaacggaataattagtgctgttcaggcaggggatctgattcttacgatacagcgcttcgacctccgccacttccatgcggcactgacgcaacgaggcatagcgactgttttcacggcgttcttcgcgaattgccgccaggcgttcagggtcaattgtcaggccgaacagtttatgttgtagcggttttaacgatgtgggcagcgtcaaattatccatatcatcggcgatgaaagggtagttagccgcacgaataccgaattgcatcgccagatagaggctggtgggcgtttttccacagcgcgaaacgccaagtaaaatgacctgagcctgatcgaggttgcgcaatgaaatgccatcatcatgcgccagggtataatcgatagcggcaatacgggcgtcatacttgttcaggttacccggattaagcccatgagtacgatgagcgatcggcgtcggatccagtttcatctcctgctgaagcggcgccaccagcgcctggacgatatcctggcagaaaccttcgctctgtaagatgatggcgcgaatttcaggtaaaacaatcgagtaaaacaccagcgggcgaacgccggtttgctgataaatggcgtcaatttggtctttgacggcgcgggcgcgactttcgttttccacgaatggcagcgtgatgctgctgatcgtcaccggaaactgcgacataaccgcgtgacccaggacctcggcggtgatggcggtaccatcagaaatatagaaaacatggcgatcaacaacattatccattctgttcatcctgaagagtaaacataattatctgaaagcataaattaaaagtaacgggaaacgtataacttgtcgcttattttataaaatgacagggactttttataattaatgaaaagtgtgtttcatttcctggaaacgcagtttataccgggggttattcagggaatgccgtgctatgcgcgggtttgcgcaactacgtaaacaatctgaaaaaatgaaaaaataaatttgcttgaacgattcaccgtttttttcgcgggtttaagtatgccaggataaatacgcaactatgtgtttcttaaactcgttcatttatcacaaaaggattgttcgatgtccaacaatggctcgtcaccgctggtgctttggtataaccaactcggcatgaatgatgtagacagagttgggggcaaaaatgcctccctgggtgaaatgattactaacctttccggcatgggcgtatccgttccgaatggttttgcaaccactgccgatgcgtttaaccagtttttggatcaaagcggcgtaaaccagcgcatttatgagctgctggataagacagatattgatgatgtctcccagctggcgaaagcgggcgcgcagatccgccagtggattatcgacactcctttccagccggagctggaaaacgccatccgcgatgcctatgcgcagctttcgtcggatgatgaaaatgcctcttttgccgtgcgttcctccgccacggcggaagatatgccagatgcttcgtttgcgggtcaacaggaaacgtttcttaacgttcagggcttcgacgcggtgctggtggcagtgaaacacgtatttgcttctctgtttaacgatcgcgccatctcttatcgcgttcaccagggatatgatcatcgcggcgtagcgctttccgctggcgtgcagcggatggttcgctccgatctcgcctcgtcaggggtgatgttctctatcgataccgaatccggctttgaccaggtggtctttatcacctcggcatggggactgggtgaaatggtggtgcagggcgcggttaacccggatgaattttatgtccataaaccaaccctggcggcaggccgtccggccatcgtacgccgcaccatggggtcgaaaaaaatccgcatggtttacgccgccacccaggagcacggtaagcaagtgaagattgaagatgtgccgcaggaacagcgcgacattttctcgctcaccaacgaagaagtgcaggaactggcgaaacaagcggtgcagattgagcagcactatggtcgtccgatggatatcgaatgggcgaaagacggtcataccggtaagctctttattgtgcaggcacgtccggaaaccgtgcgctctcgtggccaggtgatggagcgttatacgctacatgcgcaggggaaaatcattgccgaaggtcgtgccattggtcatcgtatcggcgcaggtacggtaaaagttattcacgatatcggcgaaatgaaccgtattgagcctggcgatgtgcttgtcaccgatatgaccgacccggactgggaaccgatcatgaaaaaagcggcggcgattgtcactaaccgtggcgggcgcacctgtcacgcggcgattatcgcccgcgaattgggcattccggcggtagtcggctgcggcgacgccaccgaacgcatgaaagatggcgaaaaagtaaccgtctcctgcgcagaaggtgataccggttatgtgtatgccgacatgctggatttcagcgtaaaaagctccagcgtagataccatgccagagctaccgctgaaggtcatgatgaacgtcggcaacccggacagggcatttgactttgcctgcctgccgaatgaaggcgtaggtctggcgcgactggaattcatcattaaccgtatgattggcgttcacccgcgtgcgctgctggagtttgacgaccaggatgccgcgctgcaaaacgacattcgtgagatgatgaaagggttcgactcgccgcgtgaattttacgttggtcgactgacggaagggatcgcgacgttaggcgccgccttctacccgaaacgcgtcatcgttcgcctgtctgactttaagtccaacgaatacgccaacctggtcggcggcgaacgctatgagccgcatgaagaaaacccgatgctgggcttccgcggcgcgggtcgttatgtcgcagaaagtttccgcgattgttttgcgctggaatgcgaagcggtgaaacgcgtgcgcaacgatatgggccttaccaacgtcgaaatcatgatcccgttcgtgcgaacggtcgaccaggcgaaagcggtcatcgaagagctggcgcgccaggggcttaaacgcggcgagaacgggctgaagatcatcatgatgtgcgagatcccgtccaatgccttgctggctgaacagttcctcgagtattttgatggcttctcgattggttctaacgacatgacgcagctggcgctggggctggatcgcgattccggcgtggtgtctgaactgtttgacgagcgtaacgacgcggtgaaagcgctgctgtcgatggcgatccgcgcggcgaaaaaacagggcaaatatgttggaatttgtggtcagggtccgtccgaccatgaagactttgccgcctggctgatggaagaggggatcgacagcctgtcgctgaacccggacaccgtggttcagacctggctgagtctggcggaactgaagaagtagtgtaataccggatggcggcgttaacgtcgccatccggcaatttataccgcagtgtgctcctggcgcagccgctcaataatatcctgccgcaacagaaacttctgcactttgccagaggcggttctgggcagtttttctacgatgacgatccgttccggatatttatacttcgctacccgttttcgactgaaaaaagcgatcacctcttccagcgtcagcgaaaggtgtggcggttttaagactacatacgcgcatgaacgttcgcctaagcgttcatcaggcatagcaacgacgcaagcatcgtgtatgcgggggtgttgcaataaaatatcctccacctcgcgactgctgatattttcacctccacgtataataatatcctttttgcgcccggtaattttgatataaccgtcttcatccatgcggcagaggtcgccgctgtaataccagccctcattatccagtgcgcgggcggtaagttccggctcgtccaggtatcccataaaaacgttcggcccgcgcgaggcttcttcgccttcgtggcctgctggaagcgtattgcgatcttcatccacgattttaatttctacaccggtggcggcataaccatcggtgttcatcatgcgtgaagtcgaatcacccagattaaccatcgagtgtggagaactttctgtagaaccgtaaatactcaataatttgataccgcgctgctggcagtcgcgggcaacctttttgggaatagtcgtgccgccgcataagaagaatcgtagtgaggagaggtcggcaggctgttgctcaatggcacaaagcagatcgtaaataaacggcgtcgcgcctgacatacaggtacagcgttgctgcgctaataaggtaaggcaggcttctggggtaaagatgtccagcaatacgctacgcgccccgattaaaaagggcgcggtgacgccgtgtaaaaatccggtggcgtggcccagtggcgcaggcatcaggaacacatcttgccaggttaaattcaaccgcgcgcaatacgcccgttcgctggcaagaatattattgtgggtcaacatcacccctttcggcattccttctgtgccggaggtaaacagcactgccgccagttcatcaccgtgaatgttaatgtctgactgcaacggttcgctgcggtcgatgatttgactaagcgcaagcgctgtggtggcaggcgccagtttatccacgccgacaatatgcgtcagatggcgcagttgattttgtagcggaaggataagatcgaccggacgattctgtttgaacacggtgggggcgaagaatattttagcctgacatttgttcagcacccaaaccagctctgcttctcgccaggcgggaagtagcgggacagataccgcgcccgttttcaggcaggccagataaatgagggtaaactcacaccagcccggaagctgaaaggccacgcgatcgcccggttgaatcccctgagacagtaaccagtttgccaggcggcttgccgcgtagtcgagcgcggcgtaggtccaggacgcgccatgattatcgaccacggcgattttatcgggtacggcgcgtgcggtttgccgccagtagtcgcccagtgaagcatcgccccagtagccggactcgcgataggttttccgccttgcggcgtcaaacgttaatgtaacactcattgacttgttctctattaatacaaatgacgtaatctccgggggcaagccgaataagacgccgtagcgtcgttatccggtgtttcagagcgtcagccgtagcgaaactcaacgccgaacgttcccgccgggtattcccatttttcgagaagagtattgccgcagagaaccctgcaggtcccgcattccaggcagcccgcggagtcaaaatgaatatttcccgcatcgtccagcttatagagtccggcagggcaggcttttattaatttattaaactcctgcatgtcaggcgaggagcgcaaaatgatatgtgggtgtccttcatctacgtaaaatttatttacgcccaatttgacgtcaacattcaccttattgtccgaactcataatgccgtagccccttttatgccgtcttttaatagattcaccagtccaatttttttcgcatgtgacaggatagttttacgcaacggtgggactggaccgccatcaacggtgaacagatcgcccacaatgtttgccgccatacgcgggtactcggtaaaaagccgtgggttttccattaatccggggagtttgcggaaatgccgcatatcgcgtaacacgccgtttttctccagcgcgcgtttgtaaccggcaagactcgcggcggaaaaatcttgccgcgctttagcgtcaatggcggtttgagcggccgcttgcgcggacgcgatggctaaatccatgccgcggacggtatagccgagattcagacaaagaccggcggcgtcgccgacaatcatcacgccgtcatttgccagctccggcatcattgctatgccgccttcgggcaccatatgagcggagtattcaagcagtgttcccccctgaatcaaagggcgtattgccggatgctgtttaaaatcttccagcatttgcggtacgcttttggtcgcgtgagcaatgtcgcccaggccacataccagccccagagaaaccgaatcgcggttggtataaagaaacccgccgcccatgagcccgttggagggcgcgccagcgaataaccaggcggcgccttcatgggacgccagattaaagcgctcttcaataagtgccggagagagcccaatcaactcttttacgccgactgcatagtgatgcgcagaagagacaggcaccatgtccagcgaacggcccagcatggaattcacgccgtccgcgagaatcacaatattcgcatccagaatatcatccccggcctgaacgccagtgacgcgattgccttcacgtaccagagcgtcgacccgtacacctgggataaactgcgcgccagcctgttccgcctgcgccattaaccacgggtccagtttgttgcgcagtacggtatatgacgtaaggggcggagtagggggcgcgcggtgaaaatcaagtgtgacggcgctttcttcggttaaaaaggagattttttcacgggtaacgacgcgttcgatgggggcggacgttgcgaatcccggcataatactttcgatactgtgagcgtagagccggccaccggtcatatttttgctgcccgcgctgtttccgcgttcaataaccagtacatccagtcccgcttttgccatcacatacgcggcgaccgttcctgctacgcctgcgcccaccacaatagcgtcaaatttatcatccgacatgctttatgctcctttcccgccgtatcgacgacgggagatgtgcgttgaaaaaggaattagcggcttaactggtcgatgagggcaggaacaaccttatagatatcgcccaccaggccataatcggcataattgaaaatgggcgcgtttttatctttgttaattgcgacaataatttttgcgccgtttccacccaccatatgttgaatttggccggaaatgcccagcgtcagatagagatcggatttcaacagaacgccggatacgccaatataacgctcacgttccatccagttttcaccttccgcaatggggcgggaacagcccacttctgcgccgaggacggtcgccagtttatgcaccatatccagatcgctttgcgccgccagacctcgtcctacgccgatgacccgtttggctttgctcaaatcgacgctgcttaacgatttcgcgcgccgctgctggcacaatacctcgtggcgtggggcaatatatgccagcgtggtctgcgggcaagtatgaccggggagaggggcggcgggttccagtacgccgggtgccagcgtaataatcgcctgcggactgtttaatttctctttgccgaaagcaagtccgccgtacatgcgatgctctgcgtgtagcgtcccgtcgaggaggtcaatagacgtcgcgtcgttcaccatcacggcgtcaagctggatgctcagccgggcgcccagcgctttacagcgcttggtcgccgccatgagcagcagcccattttggtcgcctaataacgaggccagcgtttcggcatagttttccacgcgctgcaaatccgtatgcgattcaagaatgactatctcatcagcgccaagcgctttcacgtagtcgatatccgtgtttccttgcacgatggcgtaaactttttctccccactgccgcgcgccggtcattaattcggcataacgctctacgttatcgctaaatacccatacgttagctaaatgattcatgataatttttctccgttgggcttagttcagggattttttcaaatggtcggccagtgcggtaatgacttccggcgaatcgttatcgagaatgatatgcttgcgttctgtctgcggcggtaccgagatggcgaccagttccgccattggcgtggttggggtccagtggatatcgctcgccagccacgacgtaacggcttttttcccggcgccgagaatggctttcattgacgggatgcgtggaacgttaatatctgaggtcacgcaaagcaccgcgggcagcgtgagctcgataatttcaacgtcttcttccagtgtgagttcaacgatgattttgtcgccgtcgcgttgaatatggcttactgcgttgatgacggggagtttcaggagttcgccagtcagcaggcccacctgttgggcataaatatcgccggagccctctccaaagagcaacaggtcaaagccgattttctccgccgcggatgctagcgccagcgcggtttctttgggcagggcgtgctccatttgcgcatcctgaaccatgaaaagcgcatctggcccgcgggataacacatctttgcggacttttgaattttgtaacagagagccgccgacggtgagcgcggcgatctcgtcgccaccgccagctaactgcgcgacggcctcaattgcatttaaatcaaactggctgattttggcctcggcacgatcaaaattgagcgaatgctccggggtcacggtaatgtcctgttcttcaggcaccaacttaaagcaggttattattttcattgcatctccagtgagtcgcgtgcggataagtaacgtaaatctgactgaaaatagtctgcggcagtctgaagaggtttacgatgggtcaatctgttttccttgccaacaatcttgcacaaaaaatctgcgaacagagaatcgttagcaaccatctgaaaagggcgtcataaaaatataaatacggtagtgagaataataagtgcgaagcatatcatcattttttaacatgaaacgtgcgatgttgtttctgtgaggttaaaagaaaacatcaaagatatgtcggctatgtatttttgtctgataatacgctatcgacaggtaatctgagctgtctgcaaaagaacataatatcttgcattcggaacgaataatcttgttttgctggtaatctccacggttgtacaacactgacgctcgctttattttatcctggttatctttttaaacctgacagaggttattatgtatcagcgctgttttgactccgccgcggagacgatttttgaacaggacaagacccctcgattttcacgttttgtcattagcgatgatccaaactgggagtctggccatcatatgcatgataatgaaacagagcttatttacgtcaaaaaagggatagccaggttaattattgactcttcactctacgtcgcgcatgcggacgatattgtcgtcgttgagcgggggcggctacacgctgtagcatccgacagcaattcgccggctaccacctatacctgtgcgctgtatgggttttgttttccaggttgggaagaaaaccaactattgcagagtcattcctgtccggtggtttccgtggttcagggaaaaggggtcattaaaagtatctttaatgaattaagcgtgttacttccgcaggggaaaaacgtattggcttcctctgtatacgatgcatttgcttacactctgaccgcactttactatgaaaattttaaaaacgcctatcgttctgaacaaggttacattaaaaaagatgtattaattaaggatgtacttgtttatctcaataataattatcgtgagaaaatcacgcttgaccagctatcgaaaaaatttcgcgccagcgtcagttatatatgccatgaatttgccaaagaatatcatatctcccctatcaactatgttattcaacgacgtatgaccgaggccaagtttgcgctgacaaacactgagtcgccactggcagaaatttcatggcgggtaggatatgaaaatgtggaccattttgccaaattgtttatgcggcatgtaggatgttctcccaacgattatcgtaagcaatttaaaaatagtctggttgagcaggcgtatttgctgccaaatacctgacggcgaaatatatctgatttattcggcctgatgccgtaaagcagtcaggccgaataagacgttccggtacgatccttacttgttctgatagtctttcagaatctggcgtcctgccacatagatcataatttcatccgtgccgccaccgatacgttcgcagcgaacatcgcgccagaagcgggagacacgggcttcgtcagtataaccaagcccacccataatctgaatcgcatcgtcaatcacttccatcgctgtgcgtgcgcagtacagcttagccagcgcggcgctggtacgcagtgactcttcccgatcggcctgccaggcgactttcaacaccatattgcgcatgttttcgattttgatggccattaacgccagcttttcctggatcatctggttatggccgatgggtttaccaaaggcgatacgctggttggcgtaacgggcggcatcttcaaatgcgcattcggcgaaacctgtactgcgcgccgcattaatcaaacgctccatctcaaaattgtacatgacattgaggaaacccatgccttcttcaccgacccggtcgctttcgtccacctcgacattatcgagataaacttcgcatgtactcaacatgtgccagccaattttgtgcagcggattaatctttatgcccggtttatttgagtccacccaccaaagcgtgaacgcttttttaggatcttttggctccgtatcgcgcgccagaaccagcatgtaaggatattcttttgcaccggtgataaatgttttttggccgttaagataaaccttgccgtttttacgcgtccaggttgttgtggcgctattattatcagagcccgcgccaggttctgttaaggctagcgcatatgctggatcgccggtggccagagtactttctgctgttttacgcagttgttctgcggaaccaaaacggcgcatactgtgaatgcattggccgttggtaatcaaaaaggccggagcgccgcattttgagatttccatcagcgccagcatttgcgttacatagtcagccggaatgccgccgaattcttccgggacgcccagcatcgaaataccgttttccgccagcgcctgcataaattctttgggataggtgcccgtttgatcgcaggtacggaaatactcttccggaaaattgctggtgattaactcgcgaatactggccagtaatagttcttgttcttcagttaatgaaaaatccatatttgtactccttttaatgtgttgcgtcaggaagcgtgaatcccatagtgctatcggtaaataatcttgtgtccatcagttttaaatctggtgagataaccggtgaaaaatccatcttgtcaagaatatcccgttgcagatcgacgccaggcgcaatttcaattaaatgcaggccatcttgtttgagagtgaaaaccgcacgttcagtgatgtaacgcacgtctaacccgcgctcaagcgcaatttttccactgaacgtaatttccggcagttcgctgacgaattttttcacgcgaccttcctgcagaatatttaatttgccatcggtaatttcagtttttaaacttccggccgtcagagtttcgcagaaaataattttttgcgacgttgcgctaatatcgataaacccgccggtgcccataattttgccgttgaatttatgtacaccgacattaccgtgttgatccacttcggcaaaacttaaatagcagacatcgagcccaccgccgtgataaaaatcaaattgtgaggtcatatcaaggatcgcgcgggtgttgacattagcgccgaaggccacgccctgagaggtaataccgcccaccgggccagtttctacggtcagcacgaagtcatcggcgcagccttcctcgcgagcgaccagaccaataccgtcggcaatgcctacgcccacattgcctaccgcgcctttacgcatttcaaacagcgcgcgtcgggctaccagcttgcgctgattaaggggtagggtaagctgcgtactatcatcaagagtgaaatccccggagataaatcggttcaccggcgcgccgccatagagttgcgtctggtcggcgtcgacaaccacaatatccaccagatagccgggaatacgcacggattttggatgcagcgtggctttttttaccattttctgcacctgcatcattacaataccgccattattgtgaacggcctgggcgatcaccagcgcatcaagatacatcacctcatcttcaaatgatgcatagccttcgctgtcgcaggtggtggcgcggataaaagccacattaggcgctatcgctttataatagagatattctttattatcgatctctaccagcttaatgagatcttctttagtcacgtcgtttaattttccgccctgttggcgagggtcgacaaaggtaccaataccgatatcgctcagaatacccggctggtgtgcggcgctggcgcgcagcgtctgggttaatacgccttgtgggtagttataggcggcgattttattttgttcagccagttcagaaatacggggagattgcccccaatgtccgcatagcgcccattttaccagtccctcctgcgccagcgggctgatgccgcgatcggcgcggtcacctaatccggtagggctaataatagataaatctcgtggtgactgggttgtttgatatttatctgccagtgcggtaattaatgttgtcgcttcgagaataccgccgcctgcgcccagaatacataaagtggcctcatctggaatataatttactgcttcttgtgcagagagcacgggaacgcggccattaatgcgtgatggcttattgattttcatatttactccactattatccctgaaaacaatatcgatataaccgtgttaaggtaataaagacagcggctttcaatgaatatggaacatattcatgtcagataactatttattttattgtggcagaaagagaatattccgccacacgataaagtattacgcctggtgcaatatagttaatacggtacgcagatcggctaccgatatttgtcccggcgcagatgcttttttcaccgcgccaaacgttgccgcagaaccgaacacttcgccggcaagacgagatattaccccggttttcgacatcgacatggtaataatcggacgatccgcatagcgctcctgcatttctacagtggcggtaagtaaggtcaggacatcggctttagtctgtggcatgacggcgatcttcggaatatcagcgcccagttcctgcattttacgcagacgctgaacaatctcttccgctgcgggcgttttatgaaaatcatggttagacatgatcaccgcaacattgtgttgatgagcatagccgacggtggctttcacctcatcgtcgccggtaaaaagctcaagatcgatcatatcgaccagaccgctgtcaaccgctgcacgattcagatcgatatactgtccggtggttagcgcctgttcgccgccttctttcgcgctgcggaaggtaaatagcaagggtttatcggtaataatctcccggatggcgccggcggcctcaagtacgctttccgccgttgtcacgttggcaaaatggtcaacgcgccactccagaatatcgaaatccgcttcacggtaggcgagtgcttccgatttcacatcggtaatggtttttcccattagcgacacaatgatctttggcgcgccttcgccaaccacgagatctcttacagttacggttttcatttggtacccttcattgtcattcgtcgcaattataattttaccggtcaggctgtgaatcccatcacctgctttacatagtccaatggaaacgcttttcctgtccacagttcaaactgttcggctccttgccataacaacatgccgtaaccatcaattgttttgcaaccagcttgttgcgcctgctgcaataactttgtcatatgcggattataaacacattcggtgaccagcaattcagggcggagcagggaaacatcgccgatcagggattcgttctccaatggtttcatgccaactttggtgccgttcgtcagaatatctgcgctggcaagcgcttcagtaaaagcgtgctgatcggcaagatcggtgacggtaacgacacaatcagtgttttcattcacccgcttcgcaaaggcaaccgctttttcgaaaaagtcatctttacggttaaacagtttaatttccttaatgccttcaatagctgcctgggcgccaatggcggtagccgcgcctcccgcgccgagcagcaccatggtttttccccgcatatcgaaaccgctttctttaattgcccgaatatggcccgtaccatccgtgttgtagccgcgtagatagccgtcatcgttaacaatggtgttgatagcgccaaccagttttgctgctggcgttaattcatcgacatactcacacgcgagctgtttgtttggcatggagacgcccgtaccgcgcatttttaatgctttcagtccttcaatggcgctggcaaacgtcgtgttatccacttcgaaagccatataggtatacggtagccccgctttttctaacgctttgttttgcatttcgggcgataagctatgacggataggatacgccataagaccaattaattcatattttgcggtaacatccattttatactccttaataagtggacagtgcagagcagggcgcatgcctgttgcgcatcgttaacatttttactggaaataatgctagccaaatcggacatcgttttgcgggatcttaaatacgcgataatagcgaataaatacaataatggcggtgataaatgtcagtagtgcaaaggcaaaatctaacaaaatgatatattgcaggccaatagtagagagataaccggtaatcagtgggataagaaagttagctacgccccccatcatcatatatatactggtgactttagctttactcttagggaaaaattccgacattaccgatacgcctaattgtaaaatacctccagcagcggaaaaaccaatcacgaaggcgccagcattacagatcagtggagagggatacaggtaaattgccgcagcggtgattgtcgccagcccggcattgaaaacattggcccagatggggcgaaccatttttttcagcaatgcggcaaaaataaacacgcaaaccaacgatcccatactgtaataagagatggttttcagcgcgtcggattccgccattccggcgaaggccatcgcatatttaggcatccagaccacaatcacatagaaggttgagaacgcggcgacgccaaataaaacggaagctacgccttccagccagacgaggggagtactgttcatctggggtaattctttcgcaatactggcatcgacaagttggctgggaaaacggcttttcaacagcatcaacgtgatgaggacgaaaaggataccggggattaccaccgcgtagccgtaccagatatggttgactagcaaggcgctgacgataaggggataatcatttgcccaaaagagaccatcgctttaaccagaataactgccgagcccgatgctttgggaaaacactccattaatgcagggtatccgccggtatccagcgcggagttcgccacgccgacacacaccgctaatatgaaagcgatcatcaggttaggactggcgggaataccgaagaaaaacagcatatatagtacggcgccaagcagtattattgcccgacggccaaatttatcggacagtacgccaaagaataaaatactgaccagacgaccaagaccaatgccagagattaaataggcaataccggcactatccgtggagaatttctgtgcaagggaggtcatgttctgggctagtgtaataacactcatgccgtggagaaagtaactaaaataaatgcagataacagccagcaaatatggcatgttgcgagccttgttctgagacatttgttcacagctccttgctgatggtttgattcaatgtcctgcttattactgctttactacatgcagcgattgttcagtaacactataagtcggtactgtcgttatatgtacataacatggcgtttaaaatgccaggtttattgcattgatagcatttcatttgttagccaggaaatataaaaattgctgcgaatttgttgtttaatacatataactcgtgatgctcatcgcaatttttctgataagtgtgaagataatgaataataattaacacgaaaattacattttttgtttcccggtgataatggctaacgttttattttgcatagcaaggcaataatattgcaactggcacgctaacatttattgcgcggttgacgctgcttcagcgtgatgttgtgattcagcccgacttcggtaaccgatgaacagtgcgaggagaaatcccactgcggcgataccggtatcaaaccacataatatgtgcaatgctcatttctaaaatccgcgctgtgatcaacggaatagtgaacgtcgcgatactgccggcgctgtaataaataccggtcgctttacctttctcctgtggaaaacgggacgccatcagcgtcaggccgatttgtactacgccaccggcggaagagaatccaatgacgaatgcgaagatcataacaatataggtctgaggatgcaggcagaccgtcagaagcgcaataaaagagataaaggtataaaacatcaataatgtggtagagcgaattgtttttctgaccagcggggcggtaataaaaacgcagagtagcgatccgcaggtataaatacttaacagtttgatggattgggtatacgacattcctgcgacgaactgtccatactgcgccagccactggctgataagataaaaggttgccatcgagatatagccataaagggtgtagctgataagatcgatgagggagcaatgatgtacgcctgtgactggcgcttgcgagattttgggcttcaatatccgaccaggatagggtggaaaagggcagcgtaataaaaacagagcattaataagcatgatcgccccggcaagcaggaaggaccagccaaaccacatattagcccagactaataaactgataataatgggcaacaagaattgcccgccagagacaaatgctttgatcagaatatttgccgtactgggggagcgagggaaggcttccatcaaactgggataggtacctgcatctaaaaaactgttggccatacccgctaaaaagccacaggcataagcgacaaaaatcgtctgagcataaagaatgccaatgaaaaaaatcaggtaacaggtggtccccagaatgataaaaggacggcgaccaaagcgatcggaaagcataccggcgattaacaaaacgcttagccggccaataccaagcgaagagatcacaatagatacgcctgcggcactggtatgccattgctgttcaagcgatgacatgttcaggctcatcaggataacccccatgccatgtacaaagtaattaaaatacaaccctacagcggtagggaaataacgatttttcatattatctgactcagagatgccgcctgaacgttacagtggtatacacaggcaggaagcatattggatagggtgacaagtcaatgtcgtgattgtgtggctttctatccggtatcaatacgatgcggcgataaagtttacgtctaacacagccgctccagatcatgtgcgaaaagttcggcagcaacagattgataaattttccactcgataaaatccccctctgtataaatggactgaaaagaagataaatcagggaagtaacgcattgtattattgccgatgcggttatttattttgtcaacaatggcgttaattcgtcgctgtctcctggctttcatttcctttagcctggcaatgatttctggagagatgggtatgtcgccagcttcccatcgttgccaggttgccgaattattatcctgggtgatatagattgtgcattcttcaatcgtcatatcaaaaatacgccgtagtgcttgtagttctaacgcgttcatcattttttaggcttttatatgaaaaaagtgatgctataaatagcaccaccgacaccgtttcgacttgaacagaatcacactattttgtgcaatattatttgttcgttgcagatatcgcggtgttgaaggaaaacgggagctggcttatgtaacaatgcggcgaaaaagttaaaaaaagcccatcgtaggagacgggcaaagactacacacagcaattcgttgtttcactcaggggatttccatgcttataaatcaatgtgttgatttataaccgtgtgctaatagtaggcatgagcactttttgcgtcgatcagattcgtctcaatagtttaaaaactgtaacggatttgcgacagaaatgagatgcggcggggaacagacgggcgaatcaaaatggagtgtgcgttgaattgataaacgtcgctaaagcatcgggcggcaatgccgcccgacgggattatgactgcttgttggcttcctcgatatcatccagctcttcaaggatctcctctggttcattcgtcggcgccggaacttcatgtacccatgcggagaacaaacgccaggtcacggccagaagcaccggtccaataaacagaccaatcataccgaatgcaatcaggccgccgattaccccggaaaggatcagaagcagcggtaaatcggcgcccatgcggatgagtaccgggcgaatcacgttatccagagtgccgacgacggcgctccaaaccagcagcacggtgccccaggtggtgtcgcctgtccagtaaagccagataatggctggaatcaataccggcaacggccccaactgaaccagacacgaaaggatcatcactaccgtcaacagagtagcgtaaggcacgccggaaatcgccagcccgacgccgccaagtaccgcctgtaccagcgcggtgaccaccacgccaagcgccacggcgcggatcgcctgggcagccagcagaaccgccgcatcgccgcgtttagccgcgagacgacaggcaaaatggcgtatacccatcgccacttgttcgccgcgccagtaaagcagggcgctaaacaacagcatcagggcgcagtgcatcataaagcgtccgatatgcgccgcctgaccgacaaaccaggtcgtggttgtgccgatataaggccgcactttcgccataatagcgctaccgcccatatccagcaggctatgccatccggcatacagtttggcgccaaccaacggaatattatttaaccatgccagatcgggtagcgtcatatcgccgccggtcactgcatggatgagcgggccgctaccatcgacaatgctgttcaccagcaaggcgacgggaataacgaagagcagcactaacagcagcgtcatgaccagtacggcaagcgagcggcggccccacaatattttttgtaatttcagcaaaacgggccaggtcgcgataacaatcgtacctgcccatgcaaaccccaaaataaaaggctgtactatccacaaacaggccacaatcatgatggctaaaaacagcaccgatagcagcacttgcgcaatatccctgggctgacgaacatttaccataaatacttttcacctttgtctttgcgccagaacgttggcgcgacgtgaacatgcaaaccacaccctataatgatgagcaatttcagcggtttttaacaggccgattctgcatgtaattctgttgggcgcacaggaaaaaaatgtgatacaacaaataacgcaacacgcaaacgattaagcatcccttcctgtgcgtagaccgctcgcgctcgccgggttgggcgccaccgttcacaacatagaccgcaggaaaaggtcaatataatgattccacaaatttctcaggcacccggcgtcgttcagctggtgctcaattttttgcaggcgctggagcagcaagggtttacgggcgatacggcaaccagctatgccgaccgtctgacaatgtcgaccgataacagtatctaccagcttcttcccgatgctgttgtgtttccccgttctacggcagatgtcgcgcttcttgcccgtctggcggcggagccgcgctttacgtcgctgatatttacccctcgaggcggcggtactggcacgaatggccaggcgctaaaccagggcattattgttgatatgtcccgctatatgaaccgcattattgaaattaatcctgaagagggatgggtgcgggtagaggcgggagtgataaaagatcagcttaatcaagcgttaaagccgtatggctatttttttgcgccggaactttccaccagtaatcgcgccacgcttggcggtatgattaataccgatgcctccggtcagggttcgctggtctatggaaaaacgtcagatcacgtcttaggcatacgggccgtattgttggggggcgatatccttgacacgcaatcgatgcccgtagagcttgcccggacgctgggtgaaaacacgacgacgccaggccgcatctatcagaccgtctatcagtcctgcctggaaaaccgccaacttatcctcgatagctttccaaagctcaatcgcttcctgacaggctacgatttacgccacgtctttaacgatgacatgacccgcttcgatctcacccgcatcttaacggggtcggaagggacgctggcgtttattactgaagcccggctggatattaccccgatacccaaagtccgccgtctggtgaatgtaaaatacgactcctttgattccgcgctgcgtaacgccccttttatggttgatgcgcgcgccttatccgtcgagacggtcgattccaaagtccttaacctcgcgcgggaagatattgtctggcactccgttagcgaattgattaccgatgtgccggataaagagatgcttggcctgaatatcgtggaattcgcgggtgacgatgaagcgcttattgacggacaggtcgaggcgctgtgccaccggctggatggcctgatggcgcgagcggaagcgggcgtgatcggctggcaactttgtaccgatttgacgggtattgagcgtatttacgcgatgcgtaaaaaagcggtagggctgctgggtaatgcgaaaggcgctgccaaaccgattcctttcgcggaagatacctgcgtgccgcctgaacatctggccgattacatcgccgaatttcgcgctctgctggatggtcatggcttaagttacggcatgttcggccacgtggatgccggggtgctgcatgtgcgtccggcgctggatatgtgcgatccgcagcaggaactgttgatgaaacagatctccgatgaggtcgtcgcgctgaccgccagatacggtgggctgttgtggggcgagcatggaaaaggttttcgtgcggaatacagcccggcctttttcggcgaagttctgtatggcgagctgcgcaaaataaaagcggcttttgatccgcataatcgacttaacccgggtaaaatctgtccgccgcaagggatagaggcgccgatgatgaaggtggatgcggtaaaacgcggcacctgggatcggcaaatcccgctggcagtgcggcagacctggcgcggcgctatggagtgtaatggtaacggcctgtgctttaatttcgatgcgaaaagcccaatgtgcccgtcgatgaaaattagccttaaccggatccactcgccgaaagggcgggcgacgctggtgcgggaatggctccgtctattggccgatcgcggcgtcgatccgttgaagctggaaaaggagttgccagaaaaacgcgccagcttacgcacgctgattgcccgcacccggaatagttggcacaaacgcaaaggcgagtatgacttttcccatgaagttaaagaggccatgtccggctgtctggcgtgtaaagcctgtacgacccagtgtccgattaaaatcgatgttccggagtttcgttcacgtttcttacagctttaccatacgcgttatctgcgcccggtacgcgatcatctggtggcgacggtcgagacctacgcgccgctgatggcgcgtgcgccaaagacctttaacttttttattaaccaaccggtggttcgtaatctggcgaaaaaacatatcggtatggtggatttacctctgctttctgccccttcattgcaacagcaactggtgggccatccgtctgccaatatgacgcttgagcaactggaacgcatgagcgccgagcaaaaagcgaaaacggtactggtggttcaggatccgtttaccagctactacgacgcccgggtcgtggcggactttatccgcctggcggaaaaactgggcaggaggccggtattgttaccgttctcgccgaatggtaaggcgcagcatattaaaggttttcttaatcgctttgcgaaaacggcgaaaaaaacctctgagttccttaatcggatcgccgcgttggggatgccgatggtgggtgtcgatccggcactggtgctgtgttatcgcgacgaatacaaactggcgctgggcgaacagcgcggcgattttcatgtgttgctggtgcatgaatggctggcgcaggaaataaatgcaagactgtccgtcgaggtgagcggcgaaccgtggtacttttttggtcattgtacggaagtcacggctttacccggcgcgcctgcgcagtgggccgccatctttgcccattttggcgcgaagctggaaaatgtcagcgtaggctgctgcggtatggcgggcacttatggacatgaactcaccaatcataaaaattcgctgggaatttatgagctatcctggcatcaggcgatgcaacgtttaccgcgaaaccgttgcctggcaaccggttattcctgccgaagccaggttaaacgcattgaaggtacgggcgtgcgtcacccgttgcaggcattactggagattataggttgatctggaaacgtgaagtgaccctcgatgcgcttaatgcgatgggggaagggaatatggttggcctgcttgatatccgctttgagcgtattggggacgatacgctggaagcgacaatgcccgtcgatcatcgcaccaaacagccgttcggcttgctgcatggcggagcgtctgtggtgctggcggaaagtatcggctcggtcgcaggttatctgtgtacgcagggggagcaaaaggtggtggggctggaggtgaatgccaaccatgtacggtcggcgcgtcaggggcgcgtacgaggcgtctgtaaagcgttgcataccggggctcgccatcaggtctggcagatagagatctttgatgaacagggacgtctgtgctgttcttcgcgtcttactacagcgattgtgtgacgttgtcaccataaaagtgtgatgcatattgcttttggtcaaaatgtgcgcagaaaaaggtgatatactgtgcacgtttacacataagcgaggatgatatgtctactgatttggacccaacccaactggcgattgaatttttacgccgtgataaaaccgaactttctcccgcgcagtatttgaagcgtttaaaacagctggagttagagtttgccgatctcctcaccctctcagcaaccgaactgaaagaagagatctatttcgcctggcggttgggcgtgcattaataaagtctgtgtaggccggataaggcgttagccgccatccggctatgttaccaggcaatctcaccagaccttgtccccaggtaatagataacccccttgattttgtttaaaaaaaatacagatcgccatttgtgctaaaaaggcgcgctctctttatgagattattcttatgccccttcaagagctaagccattaagagtgccggagataagcgccggatggggccggaacccttaagcctgtattgaacagacttaagggtttttcttttccgggcgcgtaaaaaactaaggtctgtcaataaccgccggcatgtcgtcagccgtatgattattcaaaatacggttagccagcacccctgacatcatcgatccgttaacgttcagtgccgtgcgggccatatcaacgataggttcgatggcaataaaaataccgaccagcgcaacgggaaaattcaacgtcgacaggacaatcagcgccgcgaacgtaccaccgccgccgacgccggctacgccaatagaccctagcgcaatggcaggcaacatcgcggccagaaaatgcagcgagagcggatcgatgccgatggtgggcgcaatcatcgctaccataatagccggataaatcccggcgcagccattttgccccatactggagccaaacgaggcggaaatattggcaatggtgctttgtacgccaaatttttcctgggcggaaatggccagcgggatagaggctgcgctgctgcgggaaacaaacgcaaaggttaagacgggccagaccattctgaaataacgcgctggattattaccgctgaggatcagcaagatggcatgcacgataaacatcataaaaatcgcgatgtaacaggcaccgataaaaccaagtaagctggcgaattgttcaaggcggtatgatgaaaatacggtggtcattaatgccatgacgccatagggcgttaatgcaataacgatacgtaccatcttcatgacccatatctgaatagcgttaatgcctgcgcttaatttctgaccttcttccggcgcctcttttttgacctttaacagagcgatccccgctattagcgtgaagataacgatgccgataacggaaacacttctggctcccgtaagatcaagaaaaatattagtcggaatcagcgatgtcactaactggggaatcgacaccgcggcagtcttattgacttcttccgtagttaacattgacggcatgtgcacaaaagcgctggcgtcaagccccagcacatgagcggtcagtaatccgataaaaccggcaaccatcaccaggcataacatgcatccgacgatcgtcagcgacatttttccgatgctggcactattttccagtttattgatggcggaaagaatagaaataaaaattagcggtatagcgaccagttttagcaggtggacgtaaccattgccgacgatgctgtaccattcgataatagttttagtgtgatttgctgaaataaaatgcagggataaaccaataacagcccctaaaaagatagcgataaaaacgcttttcgacagggaatcgcttttttgattaattctcaagatgacccacgagaaaaccaaaaaaagtgcgatatacgcgagcgtaacaaccatattttaagcctcttgcctcattcagcacctgaaatgccggaaagagtttacataaacctatagctcaaactgagttatagaaccgcagcggattataaagagcgcaacgccaggtatccatacaaaaaatggggttctgacctcgccgcccggcaatgtcgacagcctattaattaaatagtcattttctatacatcttttcgtttttgacctgtcagaacggttaatatcttataaatcattacttatcaaaaagttaagttgttttttgtctgtcgtatgacctggcggacagggtctatgcttaataaaaggcgctcaatatgaccatttgttggaaagcccctgcggttaaggggttgaagtgataatcattatcactaacatgctgttatatcctggtgatttagaacgcgaggtaactctatggaattgcattcagacacgtttaacccggaggacttcccctggcaagggctgacgctaacgccagcggcggcagcgcacatacgtgaactggcagaaaagcagccgggcatgttgggcgtgcggttaagcgtaaaacagacgggatgtgccggatttggctatgttctggataccgttcgggagccggataaagacgatctggtttttgaagccgaaggcgcaaagcttttcgcaccgttacaggcgatgccttttattgacggaacagaagtggattacgtacaggaagggctgaaccagttatttaaatttcataaccccaaagcccagaatgaatgcggctgcggcgaaagttttggggtataggcggtactatgtctcgtaacactgaagcaacggaagaggtcggcatctggacaggcggacgccttaattacaaagaaggatttttcacgcaactacccactgatgaactggcaaaaggcatcagcgaagaggtggtgcgcgcgatttccgcaaagcgtaacgaacctgagtggatgctggaatttcgtctcaatgcctatagagcctggctggacatggatgaaccgcactggctgaaagcgcactacgataaattgaactatcaggactacagctattactctgcgccatcatgcggaaactgcgacgatagctgcgtttcccagccgggagccgtacagcaaacgggcgcgaatacctttttgagtaaagaggttgaagacgccttcgagcagcttggcgttccggttcgcgaagggaaagaggtcgccgtcgatgcgatttttgactcggtctccgtagcgaccacataccgtgaaaaactggcggaacagggcattattttctgttcttttggcgaagcgatacacgatcaccctgacctggtcaggaaatatcttggcaccgtcgtgccggggaacgataacttttttgccgcgctgaatgcggcagtcgcttccgatgggacatttatctatgttcccaaaggcgtgcgttgcccgatggagttatccacctattttcgcattaacgccgagaaaaccggtcagtttgagcgcacgattctggtggcggatgaaggcagctatgtgagttatatcgaaggctgctccgcgcccgtacgcgacagttatcagctccacgccgcggtagtggaagtcatcatccataaagatgctgaagtaaaatattccaccgtacaaaactggttcccgggcgacaacaacacgggcggcattctgaactttgtgaccaagcgggcgttgtgcgaaggggaaaacagcaagatgtcgtggacccagtcggaaaccggttcggcgattacctggaaatacccgagctgcattctgcgcggtgataattctatcggcgagttctattccgttgcgctgaccagtggacatcagcaggctgacaccggcaccaaaatgatccatatcggtaaaaacacgcgctcaaccattatctcaaaaggcatttccgccggccacagccagaacagctaccgtgggctggtaaaaattatgccgacggcaaccaacgcccgaaatttcacccaatgcgactccatgttgattggcgcggactgcggcgcgcatacgttcccgtatgttgaatgccgcaataacagcgcgcagctggagcacgaggcgacaacatcacgcatcggtgaagatcagcttttctattgtctgcaacgcggcatcagcgaagaagacgctatttcgatgatcgtcaacggtttctgcaaagacgttttctcggaactgccgctggagtttgccgttgaagcgcaaaaactgctggcgattagccttgagcacagcgtcggttaatgatgaaggaaaaaccatgttaagcattaaagatttacaggtcagtgtggaagaaaaagcgattttgcgtggcctgaatctggagattcgccccggcgaagttcatgccattatggggccgaacggttccgggaaaagcacgctctccgccaccctggcgggacgtgaagattatgaggtcaccggcggctcggttacgttcaaaggtaaagatctgcttgaactgtcgccggaggaacgggcgggtgaagggatttttatggccttccagtacccggtagaaatccccggcgtcagtaaccagtttttcctgcaaaccgcgctgaatgccgtgcgcgcctaccgcgggcaggcgtcgttggatcgctttgattttcaggatctgatggaagaaaagatcgcattgctgaaaatgccggaagatttactgacccgttcggtaaacgtcggtttttccggcggggagaaaaagcgcaatgatattttgcaaatggcggtgctggagccggaactgtgcatccttgatgagtcggactccggactggatatcgatgcgttgaaaattgtggcggaaggcgtcaacgcgttacgcgacgataaacgcgcttttattatcgtgacccactatcagcgcatactggactacatcaagcccgattacgtccacgtcctctatcaggggcgaattgtccgttccggcgattttactctggtcaaacaactggaggagcagggttatggctggcttaccgaacagcagtaaagcgctacagcaatggcaacatctctttgaagaaaaaggagaaagtcgaactgagcaggcaagacaacatttacaacagatgttacgtctgggattgccgacgcgtaaacatgaagactggaaatacacgccgctggagggcttaacccatagccagtttatccagcagtgtgcgactatcagcgccgcacagcgtgatgcgttggcgctgcaaatcgatgccgtgcgactggtgtttgtcgatggtcggtttatgccagagctcagtgatagcacgcaaaacagcggatttgacgttagcgtcagggatgagcgccaggcgcttgccgcgccggtgcagcctgaggtttttctgcatctgacggaaagcctggcgcaatgtgtcacgtatatacaggtacggcgaaatcagcgtccgacgaggccgctactgttaatgcatatcacgcagggtgtggatggcgacgagctgaataccgcgcattatcgccaccatctggcgctggcggaaggcgcggaagcgacggttattgagcattatgtcagccttacagcggcaaaacattttaccggcgcgcgtctgacgatgaacgttgcagacaatgcgcaactgcgccatttcaaactggcgtttgaaaatgcgtccagctatcactttgcgcataacgatcttctgctggcgacagacgcctcggcgtttagccacagttttctgctgggcgccgcagtactacgtcaccacagcagctcacaactgaatggtgaaaacgcgacgcttcgactgaatagtctggcgatgccggtgaaaaatgaagtctgcgatacgcggacatggctggaacataacaaaggctactgtaacagccgccagttgcacaagaccatcgtcagcgacaaaggacgcgcggtctttaatggcctgattaacgtggcgcaacacgccattaaaaccgacggtcagatgaccaataataacctgttgttggggaaactggccgaagtcgataccaaaccgcaattagagatctatgccgatgacgtgaagtgcagccacggcgcgacgatcgggcgtattgacgatgagcagatgttttatctgcaatcacgcggcatcaggcagcaggaggcgcggcacatgattctttacgcgtttgccgcagagttaacggaagctatccatgatagcgcccttaaacagcaggtgctggcgcgaatcggccagcgactgcccggaggcctggtatgacatttcctgtagaaaaagtacgggcggattttcccatactgcagcgtgaagttaacggcctgccgctggcttacctggacagcgcagccagcgctcaaaaacctaatcaggtgattgatgctgaatctgccttctaccgtcacggctatgctgcggtacatcggggtatccatacgttaagcgcgcaggcgaccgaaagcatggagaatgtgcgtaagcaggcgtcgcggtttattaacgcccgctccgcagaagaactggtgttcgtgcgcggtacgacggagggcattaaccttgtcgccaacagttggggaacggaaaatattcgcgccggggataacattatcatcagcgagatggagcatcacgccaacatcgttccctggcagatgctgtgcgagcgcaaaggcgctgaactgcgcgtgatcccattgcatcctgacggtacgctgcggctggagaccttagctgcgctgttcgatgaccggacccgactactggccattacccacgtttccaatgtgctggggacggaaaacccactgccggacatgattgcgctggcgcgccagcatggggcgaaagtgctggtggatggcgcccaggccgtgatgcaccatgctgttgacgtccaggcgctggactgcgatttttacgttttctccggccataaactttacgggccgaccggcatcggcattctgtatgttaaagaggcgttgctgcaagaaatgccgccgtgggaagggggcgggtcgatgatctcgaccgtcagcctgacgcagggaacgacatgggcgaaagcgccctggcgttttgaggcgggaacgccgaatactggcggcatcatcggtctcggcgcggcgattgattatgtgacgtcgctgggactggataagattggcgattatgagcagatgctgatgcgctatgcgctggagcaactggcgcaggtgcctgatatcacgctatatggcccggcgcagcggttgggcgtcatcgcgtttaatctgggtaaacaccacgcttacgacgtcggcagctttcttgataattacggtatcgcggtacgaacagggcatcactgcgcaatgccgctcatggcctggtatggcgtgccggcaatgtgccgggcttcgctggcgatgtataacacccatgaagaagtggaccgactggtggcaggattaacgcgtatccaccgcttattgggataacagtgaggttttatggctgcgctaccggataaagaaaaactgctgcgtaactttacgcgttgcgctaattgggaagagaaatatttatatattattgagttggggcagcgcctggcggagttaaatccgcaggatcgtaatccgcaaaatacgattcatggctgtcagagccaggtgtggatcgtgatgcggcgaaacgccaacggcattatcgaattgcagggcgacagcgacgcggcgatcgttaagggccttatggcggtggtatttattttgtaccaccaaatgacggcgcaggatattgtgcattttgatgtccggccatggttcgaaaaaatggcgcttgcgcagcacctcacaccttctcgttctcaggggctggaagcaatgattcgcgcaattcgcgctaaggccgccactcttagctaaactgtacagacagcgttctacctgatgtcaaatcctttgtcggacggcgacgtcgctttatccagagtggatagagcgtgtattttgttattctgataagcgaagcgctaccagtcgtcgcagagggcatcaccaggaatacaggaggtttggtatgaaacgtgcgtctttcattacgctaactattatcggcgcgtatagcgcgttacaggcagcctgggcggttgattatccattaccgcccgaaggcagccgtcttattggtcagaatcaaacctataccgtacaggaaggtgataaaaacctgcaggctatagcccggcgttttgatacggcggcgatgctcattcttgaagcgaacaatacgattgcgccggtgcctaagcccggtacgctaattaccattccctcgcagatgctattgccggatgcgcccagggaaggcgttatcgtcaatctcgcggagctacggctgtattattacccgccgggagaaaaccgcgtacaggtgtatcccatcggcatcggtttgcagggactggaaactcccgtcatggacacccggatagggcaaaagatccccaacccgacgtggacgccgacggcaggcatacgccaacgttcgcttgagcgggggatcacgctgccgccggtgatccctgccgggccaaataacccgctgggacgctatgcgctgcgtctggcgcacggtaatggggaatatctcattcatggcaccagcgcgccggatagcgtaggtctgcgtgtgagttccggttgcattcgcatgaacgcgccggacatcaaggcgttatttgcgcaggtcagaacggggacgccggtaaaagtgattaaccagccagtgaaattctctgtcgagccgaatggcattcgttatgtagaggtacacaggccgctatcgccggaagaagagcaaaacgtgcagacaatgccctatgtgttgcctgcggaatttaccgcgttcagaaacgcgcaaggggtggatagtcgcttggtcgataaggcgctataccggcgagccgggtatcctgtcagcgtgagcgccgggcagacgccggcggtaaatacgaccgcagtcgaatccgctcagaacggttttgtcggggaagaggggcaaacgcgcgcgacgcagtagcctttgcagcaaacgacggacaaaaaaatggcgcacgatgtgcgccattttatattgtgcgtcaaattatttacagatgcggaatactttgttgtccagacgttggttcgcgcgagcagcatcgtctttagcagcctgaacgtcggaacgcattgcatttacgtcattactcagttgctcaactttagcgctcagcgtctgtacatcggaagacaactgatcgattttagcgttgcttgaacaacctgccagtaacgtggaacccagaactactgcacctaagatcagctggttagtacggttcataacaataacattatactttgtgtggttatgtgggtaaaaaaatggcgcacgatgtgcgccatttttattacgcaggtactattacttacggtatttagtagcctggttgtccagacgctggttagcgcgagctgcgtcgtctttagcagcctgaacgtcggaacgcattgcgttcacgtcgttgctcagctggtcaactttagcgttcagagtctgaacgtcagaagacagctgatcgattttagcgttgctggagcaaccagccagcagagtagaacccaggattaccgcgcccagtaccagtttagtacgattcattattaataccctctagattgagttaatctccatgtagcgttacaagtattacacaaacttttttatgttgagaatatttttttgatgggaatgcacttatttttgatcgttcgctcaaagaagcatcgaaatgcatgaaagtccctaaaaaaccgaaagaaaacagggggcttccatcggattcttcttagataatccgcaattagatagtaaaatccgatttgatttttttattaatagtggctatcgattaaataaaaaaagcgccggaagggcgcttttttaaacaaattaattcacacaacaattattacagtacgtgaacagaggcggtgttagtggtgccgcttggaaccagcgcgccggagaccatcactacgacgtcgcctttctgggcgaggccgctttgcagggcgacatctttgcccagacggtagaaatcatcagtagaattgatttctttcaccagctgcgataccacgcctttgctcagtactaactgacgggcggtcacttcattggtggtcaatgccaggatggtggcgtccgggaagtatttacgcacggcgcgagcggatttaccgccctgggtcgctaccacgatcagcggcgcttccagtttttcggcggtttctaccgcgccgcggcatactgcttccgtaatgcgcagtttacggctgtcgttgttgtagtccagacggctgttcatgacgcggtcggtacgttcgcagatggtcgccatgatagaaacggcttccagcgggtatttcccttttgcggattcgccggacagcataaccgcatccgtaccgtcgaggatggcgttcgcaacgtcgcctgcttctgcgcgggtcggacgcgggtttttgatcatagaatccagcatctgagtcgcggtgatcacgactttacgtgcgcggatacatttttcgatcatcattttctgcgcaaaaatcacttcttcaaccgggatttctacgcccaggtcgccacgcgcaaccatgatgccgtcggaagcttcgagaatttcatcgaagttgttcaggccttcctggttttcgatcttagagataatctggatattttcgccgccgtgagctttcagatgctcgcgaatttcgacaacgtcagaacgtttacggataaaggacgccgcaacaaagtcaacgccctgttcgcaaccgaagatcaggtcctgtttgtctttttcagccagcgccggcagagcaatagaaacgcccggcaggttaacgcctttgttctcgcccagatcgccgttgttcagcaccttacaaatgactttattgccttcgatggcggtcacttccataccgatcagaccatcgtcaaccaggacggtgttgccaacgctcaggtcgctggtaaagccttcataggtgacggcaacgatttcattattaccgaccacggatttgtcggtggtaaaagtaaaggtttggcccgctttcagcgaaacgtcgttaccgccttccagtttaatggtgcggatttctggtcctttagtatcaagcagaatagcggcttttttaccagttttgctcatcacgttgcgcaaattctggatacgctgaccgtgttctgcataatcgccatgagagaagttcagacgcatcacgttcatgcccgcgtccagcattttgcttaacatctcttcggattcggttttcggaccgatagtacaaacaattttcgtctttttcatgacagtcttagtctttaagttgaggaggatatggaaatctggcttcgggcgcgcacggcccggaagctaagcctgtgttgctaaagtgatgatgcctcgctctaaggataggtgacatcgaaagagcgtgcagaggaatgtgtgctcgcgtttcagcccaacgggaaggggataattttagtcgttgagttttacagtccaatgcgctgaaaccattcaagagacaattggcgcgcattatacgctgaaatttacaaaaaaggaaaatgaaaaccctgtttcaaaagacatctgtgcagatccacaacggtttgttattacgctgtttacgatgtcgctggcgataacgccgcccgaacaggggcggcgttgcgcaacagcgggtgttgttgcgcataatgtcaatcgagcaactttttgccttccaggtcgatggcgatgttttggttgtgtgcttttcgatagcacagaatcgctatcccgatggccgcccagctaattccgagtatcagagcgtgaatgttcatgtttaaacagacgtagccgatgacgatcatccccatgatcggcgaaatgacatgggcgaaaatgcgccgctgggctttcatccggaaattgaacaggataaacacacacaggttcacgacaaaaaaagcgaaaagcgcgccaaagttcaccagcgtggagatagattcaatcttgccggaaaacaggtagctgagcagcagggtgacgccgccggtaaacagaatggcataatccggcgttttacgcgtggtatggacgtgagcgaggaaggcgggcaacattcggtcgcgccccattgaaaataacactctggacaccgccgtttgcgcggtaataatgttgccgacggcgcacacaaacgccacaatgatggaaaacgccactttgagccagataccgccaacgttgccggcaatggtgaaaaatgcttcattcgtcgcattaccttccgcgaagcggtcgacgttaccggtggcgaacgccgcaaacgccacaacgataataaacagtaccgtcgccaaaactaacgccaacagcgttgctttactgacggcgcgtcccccgccttcgctttcttcacttaatgtactgatagcgtcaaagccgagaaagttcagcgcagccaccgaaatcgccgtcgcgatgagccctggggtgaaccactgtgaatcgaaaaaaggccggaaggaaagcgttatctgactactgtccagcagcatcagacggacaatgagtagcacgaaaatcgccagaataccgagttgaataaagaccagtaacttatcgaatttcgccgtttgctgtatcccgagatagttgactccggtgccaatagccacataaatcaacggccagacccagaccgggatttgcggtaaaatagcgtggaccgcgacgccgcccagcactgccacgagcgtagggaacaaaagataatccagcagtaatatccatccggtcagaaaccctacggcgggattaatgcatacgccagcatacgcataggccgaacccgacgaggagatatgctgcgataaggtagagtagctgtacgcggtaaaaaacatcgcgatcgcgccaataatataaaccagcgcaaccataccgtgcgaaagattataaacgacgccataaagagagactggcgcgataggcaccataaacaccagaccataaagcactaaatcggtaagagacaattttttgacttttttcatgataaataccttaatggctttttatgccagatcgcgtaaaaacgcgcttaccgctgcgaggcagggcgcgatattttcttcatgcgggttatggctgctgccgggaatagtgaccgcgcggcagtctgaaatgtgagagagaagcggagagacgacgcgctcggttgcctgatcgttttcgccgcgtagtaccagaacaggacagcgtatctggcacaaatggggcgtaatatcccagtcggcaagtttgccatttgccgccagttcattggttccccataaaatgtgataaaccgtagggtcggcggcgaactgcgcattagagcgctgaacatgaacggcttcttccgcgagggtataaacgtgtctggcataataagcgaccagctgttccggtgggttttgataaatgacggcgggcataatgacgtttttgatatcgtcatcggacattggcgtcagagcgttaaagagccgtatggcttcctgttgccacagggcgatactggccggcgaactggccagtatcgtcccgcgaagcccggcaggctgtaagcaggcgtgctctgcggcaagcattccgccccaggaatgtcccagtatcgaatacccgtgtccaatacccaggtgatgaattaattgggttaattgacggagataacgcgcaatagtccagaaagacgcgtcagcatgaggaaaatgcgttgaacgaccgcagccatattgatcgtaaaatattaccatgcgcccgtcatcagccagacggcgataatttaataaataatcaaagccgccagaagggccgccatgaaggataatgagcggcgtgagtaatgattttctgtctccataaatccgatagcttgtcaatatgttttcagaaaacatttcgccatagagataagtatcattcatattcttaatgactcagtgtgtggcagggcaggcgaaatttatattcgcctggataatattatttttttattgtgtgtaaaacattacaccagaaggtggcgtaatgttcccattgcagaaactgcggacttccccagtgcggcgaacaatcactggcaaaacaacatactttccctttatggtaagtacccataactaacagtggatcgccattaatttcagcaaggacctgactattttctttggcgataagcttgttatagcccaacagcggcggccattcgctaaatggctgggtaataacatgctctaccgcagtatttactgctttacatccttgcggtagttctacgcggtcatctacatccagcatatcaaccggcaatacttccgccagaaccgtatttttataattggcttttgcttctattcccgtaaaggataaatacccgccgatcattaacagaccgccgccctcagcaacataatcggcgataagttgtaatgcatcaggaataatgtccatattataaaacgttctgttttgtagcaggaacgtattgctaccgatatcactgatgacgatcgcatcatagcaggctaatgcttcggcggtttgtggaaaacgagtttgcacaatatgggcaggcatgtagtccacatcgatattaccctggcgtaagcaggataataaatagtctgcaccttcttcatatttgctcgatgtaaagctatcaaaacctttagagtgaatcatatgaatgtgccaggattcgccaataaataaaattttcattatgtcacctgttaattaatgtgaatgactttattagattgggtacgcattcgatgtaaaacctgcaagtgctgaggcatactcgacgcaccgacttgttccaccgccagagaagcgaaagcggaggcatattgaatggctgcgaccatgtctgcttgtcgcgccagcgcggcggctaaggcgccattaaaagcgtcaccggccccagcggcatcttttaccacggcgctccacgcaggaatatacaacgtgcgggcgtgctcacagatcagagagccacgggcgccaagggtaatgatgacttttttcaccccggattgcagaataatatttccggctttttttgcatcattaatatcagtaatggttacaccggataaaaaagaggcttcagtttcattcggcgtgatgatgtcaatatcagataataaatgcgtcacctgtttcgtatagggggcagggttcagcatgatcattttattttcttgtttgcccagacgaataaattcagtcaacgcttcaatgttcgtttcgagctgcattaacataacgtcagactcggcgatataacggtgttgctcattaatctcttgcgtggtgagcatcatattggcgccagggtagatggcgataatattatcgccatccacggcggagacatagatcaatgcgctaccggtgggtgctttatctgtttgatacgcgctgtatgaggtgatgcctgattgaataatatgattcatagcaaatgcgctgaactgatctttgcccactttaaaaataaaatgtgccgcagcgccagcgttgtttgccgctaaagcctggttggctcctttacctccaggatagaatccaaattgactggccagaatggattctccgctttgtggaaaccacggcacggttgctgaaacatcaatattgaatgagcctaaaacacacaccttgcctgctttttttgggttttcccggcgcagttttgcatcctgatggattggcgtggcgatagtgctggagatatcaatcttattttcagtgataagcttactcagcgcgtcacggtttaaaatccctccgccatagcaacgctgaagcatacctgatttctggaaatagcgtagatcggaacgaatagtctcctggctaaccttataaaggtctgaaagtttactgacgctaacactattatcctttatcagtaaattaatgatggcatgacgtctttcttctttaaacatattgcctccgggtagtgagttgaattgtatttatggcaatgttgtcatgcggtgaattcaatcacagattatgcggtcaaccggaagtaaccccaaatgaatgtcaataatcagaagcgcagccaatgtgttaaatattaattgcttacagaaggggaaaatagttttgtgagtgttgtcatatattttctatgtaatatgacggggtgaacgtaaaatagttgggcttgcacgattcagtgagtatatgcagccggacagcgttcgcttatcagtctctaccctcgacgaaataagacgatatcgctctccggcccgggggttatatacgctcgatttttgccggcagcccctgacgtactgccgcgccagaaacccagtcgagccaggtgttggtaatggttcttgtcggatcggcaaagcccagatcgttaagatttatgcctgccctgatttgtggatcatacggcataggcacgccatccagagagtgctgcgttgcgcccatctcgcggtggccatatccgtgttcgatggcgatgacgcctggcatcacgccatttaacaaactgatttgcgccacgacctgaccgcccggcgtaatgatccgtacccgatcgccatgttgcagtccataacgctcgccgtcttgcggattcagcgccaccaggtttgctggcttcacatggtgtaagcgcgggatgacggctgttgagctggacatggtatttgatttaaatgaaatcagtttcagcggccattgcccaatgggaaactggtcgtcaatcgcacgaccatctgacaaacgcgccggataccagaccgggcaaccgctgaagcgctccccggtgatggcgtgacggtgggcggcgacatctgcattccagatctgtaagggttttttccacgcgttacctaaccgttgctccgtatagccgctatcctcgggcgcaaaccggccgccacgcgagtagataaacgccacgcgaccgacctcatcagctttaagcgtgtgctgaattgctggcagaatgcggctgacgccggtaagcgaaatatcttcctgatttgccagcgcgaccggcgtcttgcccataaaggcgatattagcggctacgcgcagatagaagtcttccgcccggttcagtggaaaagtattgccctgcggatcggttatcgcccggtcgccgaagccgggcagatggagccgttttgctaccgcaatacaaaatgcttccattgagacaggttgcccgtccgccgtgcggtgagtggcgggggcgacaaccggccagcgggcggtagtggctttactggctacgccgccccagggcgccgtaaagccccagctctcaaaattgtgcgtatccggcacaatgtaatccgccagcgccgtcgtttcattcataaaggcgtcaatcgcgataaagagcggcagtcggcgagggtcttttagtttttcttccgccacggcgcgtagaccgggaacaccgtaaaacgggttgctcatattggaaatccaggctttaagcggataaggatagccttcgagcgcggaggtcaacagttcggtaagctggcctgccacaaagggataccacggcgctttggctggataaggggattgcccaccggcaattttgtcgcggtattcttccgatgcttcataagcggttttgctacgggcaatacttaacccggacggtttcacttttccggcaaaactgttcatgttgtagcgggggccgtcgctaacgccgttgaatttgccgccgccgacaaagacgccgccggacaagctgaggttgccgatcagcgcgttaagcatcatgaccgaccaggcgttataaaacccattgccggccatcatgccgccgtgactgatgaccgcagctttacgtccgtgactggtaaaggtttccgccagcgcgataatttgcgcttccggcacgccgcactgttcgctgtattgcgccaacgagagcttttctgccgcctctttcaggcgttgcaacccgctcttcaccgtgacccgttggccgtcggcgagcgtaacgtactgcgtcacgaaaagccgtgcctgtcggcaagtggacgcatcgaccaactcgccgtcggtattcagtacgacaggggtctcttcgccatcgggcgtaagatggcgcagcgtcaggtgttgtccggcaagcgtcggcagctcatccgcaatgaccaggtgcgtggcgttggtccaactttgctcgccggcctgctgcatcgcctgtacgccgggaatcgccagataatcagcattataacgttgattatccatgatccagcggatcatccccattgccagcgccgaatcactgccgggcatgaccggttgccagcgaccgcgaggatcggcgagcaccgttgataaggggagggcgggggcgaccacgacgtattgaaaattctcacgcagtcgggcgctcgccaactgacgtgcctggcgtttaaacggattgccggactgtgccggggaggtgcccataaagagcgcaaactccacgttttcccagtcgggtttgacatgcgggtttttatccagatcgcccatcaatgccccggagccggcccggtaagccagtccacagtaggcgccatgcgcgccgaaattcttgctgccgaagctatttagcgcaaaacgacgcagaaacgcatcgcggccttcgtcgctggtattcgtgaccagtaactgattggttttgggcccgaaactggggtgctttgcgtcaattggcgtatccggcgcatgaatagcgcgcagtccgtccacatgaccttcgccaaacagatcgccgccttccacgacttcttcaataagttgctcaaagctgatgcgctgccatttcccttcgccgcgtttacccacgcgtttcatcggttcaagcagtcgtagcggactgtacaggctttccagcagcgtggcgccgcgcgcgcaggcggttgagcgggcgtcaagaccgctttctcccgccagttgctccatggcttcgctaaaagggacggacgagtcaatcgggtgttcctgcgacaaggggtgatagggattgccggcgatgcgtatcactttgccatcggcattaacccgggcgcggataccgcactgtgtccaacagccgaagcattgcgtcatggcgatggtttgttgtggattttgctgccagtgtgtttgcgcctgcgcctccggaattaacgcattgccaaagatgcggtcgcgcgttaccttgccggacgtcccgtttaacaggccatcaattgcgcgtttcgccacatcacggtagctcagaccaaaagtgaccatcccaccgacggcgagaccgacttttagccactgacgacgggttaaattagccatgttgtaatctcctggtgagtccgttcagcgtttcacgaataataatcagtagcgctatccacaggccgaaggtgccgagaatagccagccagccatccgttccgcctggtaacgagtaagggttaaattgcgcgttgaacttggggacggtttgtacctgaatcaacaatgtccagcgcatcagccaacatagcgccagcgcgctgagaaccagcaggacgcgtcttagctgtgataacggatggcgtagcgccaggctacagaacagcagtgtgcatacccacagcgctacccagccgacagcgtaatatttggctgacagggcgacggtaatccactgacggattgccgtgccggaaagcgtatcgccgctaacccacatggccacaaccagccccagcgccgccagcgtccagatttgtccccacaatatttttggcagccttaccgagtcgtgtcgggcggcgacaatcatcagcgcgaagaatgcctgtaaggcgctaagaaacatcgccacggggaaggcgtagctaaaccagattgggcgcgccagcacaacggagacttcgcggccggtataaatcaacaggcccaccgcgcaaagcgcgctggctaacgccaaccatttagtgacgttgtaacttttattgaataatcgtttaatctgctgcgccaggaaccacagagcgagaaatccggtaaacagcggcaggaataacgctccccagggcatccacgaccagggcgtcggccaggcatagaaatgccagacgcgggcggtctggtgcagatccgccgtcagcgccagcggtgcggtaatcgcacaggtaatggcaatcagtaatgcccgattttcttctgttgcggcgtcttttttccgccagtgaagataacaggcaaacagtgcggcgcaggcggcaatgccaataaaaaagaaatattgtaccgcccacggcagccagctaatgtcctgcgggtgagccagcacttcttcaatgatgagtgaatgcgtcattcagacctcctgccaaagcgcgggctgcgcacggcccattaatggggtgacaaaggcgtcgtccagacccaggtagaaaacatggggcgacgtgccgttttccggctttaataccttgatagcgtcgcgatgctgatgaagcatggtggcgatgcggctatggggatctttgatatcgccaataatacgcgcgccgccgacgcaggactctacgcaagcgggtaacagtccggcttccagacgatggacgcaaaacgtgcatttatcggcagtttgcgtttcatgattgataaatcgggcgtcgtaaggacacgcctggacacaataggcgcagccgacgcagcgtttgttatccaccaccacaatgccatcttcccgctgaaaggtggcttgtaccgggcagaccggcacacagggggggttatcgcaatggttgcacagacgcggcaacagcacattcgtgacttcctgactaccttcacgctggacctggtattggttcaccgtcgtacgaaacgcgccttgcggcgtttggttttcaatagtgcaacttacggtacaggactgacagccgatacaacgccgcagatcgataagcatggcgtaacggtgtcggggagagccttcatgccgctccggcgaaaaaggaaatttcgcttcagccagcggaaccagcgaggcgccagcggtcaggacgccaagctgctggagaaattgccgtttactgctgtccatattgactcccgtccacattgccaacaatgaaacatttgtcacgatgttggttcatgtgtaatgaataaaaaatgtcgatgatttacagtgtaaaaatcgaggcggggtgcgctctattgtggttaaccacatacccggcttgttgttgatctaaaacaacataattgacagggatattggggtgagaggtaaaaccgtaaggcgcctggcggtgttggcggcagtagggctactttgtcatggcgcgtgggcagggacgtggaatatcggtattttggccatgcgcggcgaggcgtctacgcgtagccactggcaaccgttggcaaagacattaagccaacagcttccaggcgaaacctttcacatccagccgctggatctgcatcaaatgcaggaggccgttaaccagggaaccgtgcagtttgtgataaccaacccggcgcaatttgtccaactgaacagccatgcgccgctgcgctggttagcttccctgcgctccacgcgcgatgggaaagcggtgagtaatgttattggcagcgtgattttgacccggcgcgatagcggcatcaccacggcgcatgatctcatcggtaagaccgtcggcgcgattgatgctcaggcgtttggcggctatttattaggctataaagcgctcagcgacgcgggcttacgcccggagcgcgattttcatctccgttttaccggatttcctggcgatgccttagtctatatgctgcgcgaaaaagcggtgcaggcggcaattgtgccagtgtgcctgttagaaaatatggatcaggaaggattgattaataaaaaggactttatcgcgctgctttcccgaccgacgcccctgccttgcttaaccagtacgccgttatatcctgactggtcgttcgcggcgctacctgcggtaagcgatgcgctggcggatcgcgtaacgcgagcgctattcaacgcgcccgccgccgcgtcatttcactggggcgcgcctgcgtccaccagtcaggtggaagccttgctgcgtgatgttcgtcagcaccctcagcagcgtcgactgtggctggatgtcaaaagttggttaatccagcaccagctaatggtcggcggcgtgattctggcgttcttgttgctcacgctcaattatatttgggtcatgctgctggtgcgtcgacgtggaaagcaactggaacgtaatagcgtagttcttcatcagcatgagcgggcgctggaaaccgcccggcaaatgagcgtgttgggtgaaatgacctccgggtttgcccatgagcttaatcagccgctttccgcgattcgacattatgcccaggggtgcctgattcgactgcgcgctgcagatgaacagcatcccttgctgccggcgctggagcagattgaccagcaggcgcaacgcggtgcggatactctgcgtaacctgcgtcactgggtcagccaggcgcagggcaacccggtgctaaccgaagcgtggaaggccatagccattcgcgaggcgattgatcatgtctggcaattgttgcgtatggcgcaacagtttccgacagtgactctgcataccgaggttagcgctgcgctgcgcgtaacgctgccgtcagtgctgctggaacaggtgctggcgaatatcattcttaatgcggctcaggcgggcgccacccatttatggatcgttgctgaacgcactgaaaacggcatcagtattgttttacaggataacgccgggggaatcgatgaggcgctattacgtcaggcgtttcagccgtttatgaccacccgtaaagaggggatgggcttagggctggcgatttgccagcggctggtgcggtatgggcggggcgatatcagcatcaggaaccagaccgcgccggacggtctgtcgggaacggtggttacgatacatttcttacatgaaaatgggggcagggatggcgacaattcatctactggatgatgatacggcggtcactaacgcgtgcgcgtttttactggaaagtctgggatatgacgtaaaatgctggacgcagggggcggattttttggcgcaggccagtctgtatcaggccggggtcgtattactggatatgcgaatgccggtactggatgggcagggcgttcatgatgcgttgcgccagtgcggaagtaccctggcggttgtttttcttaccgggcatggcgatgtaccgatggccgtggagcagatgaaacgcggcgccgtcgattttctgcaaaaaccggtatcggtaaaaccgctacaggcggcgctggagcgtgcgctgacggtttcatcggcagcggtggcgcgtcgtgagattatactgtgttaccagcagttgacgccgaaagagcgtgagctggccagcctggtggcaaaaggatttatgaaccgtgaaattgcggaagcgatgaatatcgcggtgcgtaccgtagaggtgcaccgcgccagagtcatggaaaaaatgcaggccggtagcctggcggaactgattaggcgtttcgaaaaaatggcctcgccagagaccagaatacgaacaacgtatgagccatgaataataaaccgcgttatttctttgatttgcatcaaattttgtttaatagagaagactgttatattctgttggtttgatctggcgacgagtaaaacgtatgacaaaaccgacaaaagatgacgaactgtaccgcgagatgtgccgggtggtgggcaaggtcgtgctggaaatgcgcgatctggggcaggagcctaaatatattgttattgcgggcgtgttaagaaccgcgctggcgaatcaacgcatccaacgtagcgcgttagaaaaacaggctatggaaaccgtgattaacgctctggcgcggtcatagccgctatcagggtggcaataacgacatcgcctttgaattgtcgcgattgtcaccatggcgggcgggttacccgccgttagcgatgcgcagggttatcaggtgatggctaagcgcagccctaatgtatcagggtacggctcaaaataattctggctgcgtagatagtcatccggatgttccgccagatagtgcttcagcagcgttaacggtgccaggataggtagtcggcccgcccggtagccgagaatcacctcgcgtaattccgcgcgttgcctgctgttcaacgcgcggtgaaaatagccctggatatgcatcagcacattggtgtgatttttacgtgaagcggggtggcgcaggatagccatcagtttttctctgtatcggacaaagaaggcatccagatcgtcccactcatgcagacgcgcgacgaaagggccaatttcgcggtagccggcctggtggtgggcgagaagctgaagtttgtatcggctatgaaacgcgagcaaactgtgacgactcaagccctgcgcgcgtagcgcatttaattcatgtagcgcgaagatacgtgcgatgaaattctcgcgtagtaccggatcgtgcaggcgaccatcttcctctatcggcagccagggatatttgtccatcatcgcggcggtaaacagccccgtgccagctttgcggcccctgttacccttttcatcatacaggcgaacgcgctccattccgcaactgggcgattttgcacacacaataaaccccgccagttcgcctattgttggcagaaaccgatcagcaaaggcattcattcgctcggtgacgtcatcgtgcggggcatggctatagcgcatccgaatgtcgccacaggtcgtctggataagacgcagcgcagggcggggcacgggcaggccgatcgccacctccgggcagatcggtttgtaggccacccacggcgccagagagttcatgacaaaatccatacgcttatgtccgccatcaaagcgtaccgtggcgccagtcagacatccgctaatgccgactacgggtttgttattcatgattcccccttattgaaagtacgacgactgacgccaatggcgcaaaatgttatctcacgctgatttaaaacttacacaactttgtttttttgtctaagttttcgcggagattttttttgacgtaattaaatatcaataagatagaatgaggggaagaaatctatttcagcgcctatagtgtgataacctccagcgaagcgaccacgttgcgccactgggcaagctgttttttctgcccggcagtgagctttccggtggtcaccaggaaccattttctctgggcgaacagctcgggcgccagcacaactgggggcgagggaagcacattgagccgcagctcttgtccggtacgagtcaacgcttccagccagatttcacagtgatccgagagattccatccgctaataaaggcattgttgccaggcgcttttctgtcgccttcaaggcaaaaagaggtgtaggcaataatgatgccatccagtatttcgcgcagcgtcatcacggcgggaagatgcgcggacactttgctgcgcaacggacgcaataaatgggtcaccagttctgcgcggggatattcccggccacagtcataaatcaactgccgcagcgcgtcaattcgcccttcgtggagatgttgaagcatcgtctcctggatcgttatccagttatcgcccaggcgaataaccggacgcgacagtaaggggttgacctggcttatcggtacgccttttctcacccagtcgagaatgctaagcgcttgtcgaatatcgtcatcgctgtataagcgatgtccgccatcagtacgctgcggtttcaataaaccatagcgtcgctgccatgcccttagcgtggcggcattgataccgcatagtctggcaaattcgccgatagaatacgacatggtaaagcccgttaaataaggggattctactatatcatgatcaaatgaagactaaggtagtgataaatggtgcggcataccagggcatccgtatggattttgtcgatgatgagcaatactgcgtggcgtaaggctcatcaaaatatgaccaatgcttaataccatcggacgcccctggttaatactctattaacctcattcttcgggcacagttaagtaactctgtcactttatgaacctgtagctttctcatcatattcatccggtgtgtttcgacggtttttatactgatatgtagcttttcgctgatcccatgattggtatacccctcgtcaataagtttaagaacctgacgctcgcgcaaagtaagcagttgatgattggtcgtgtcagcgtttaattcagccaggatagcttcccgattcaacgttgggtcaatgtaacgcttgtttactgctactgtttgcaatgccgctaacagaacttgctgactactgctttttaaaacatagccattagcacctgcggctaaagttttaatggtcatatactcttgttggtatgctgtgtaaaccagaatattcattgctggccaacgctgatgtaattgaggaatgatatccaggccattgatgccaggtagactaagatcaaggataagtatgtcaggctcgtatgcacaacaggcattataaacctcaagaccatttttaacatgctctacaattttaaaatgaggccagggtaataaggcattcataatgccgttaatgatgatttcatgatcgtctactaataagatcttatattctttcattttgctgccctcgcgaaaattaagataatattaagtaatggtgtagtttttgaagatcatacgtattttctggcgtaagtcggttagttcctccagcgcgatgattttccccatttttacgcgattctcaatgtctatgacatagcataccaattcagtctgccctatttgacctaaacagccttttaatgtgtgaattaactgatcgattttttctccagccgatacggcattttcaatatcagccagcaagaggtccagtgattggaaaatcttgctattaatgaccatatcatctgtcgccagtagcgctgagcagcgactcggatcctgctcctgtagctctatatttcgtaaaagttggtattctgcggcaatactgatgtagcgagctaaggtagccaatgtcactggttttgtaatgtaatgatgaatcccattttttttacaacgatgaatatcttctgtcgctacgctagcggatagtgccacaaacatgcagtcaggatctaaattattcggctcatcatgccataatcgtacacattcaataccatctatttctggcattctaatgtcaatcagtactaaatcgaatcgctgctgttgtgataaagtcagagcctcgttactactggcggcaatagtgacgtgttggcccaggctgacaagcattttgccgatgatatcccgattaatatcggcatcatcaaccaaaagaatctgcaactgccagggtggtaacaaattatttattactggcatatttggtgtacacaatattaactgttgcgccaggtcgtagagttttccggagaaatacaaaagctctgcgttgagaagcgcattttgctggtggggtggttcaccgcgtattccccagcaagccagttgccgatgcaggcagaacggcgctgacagcgtccctttaattggttgaggcggctggtattcttgtaagggtaatactagcgagacacaggttccaaccccggggacactttttagtgtcagattaccgcccatcattttagccaggcttgacgcaatagtcagtccaattcctgtaccttgcgaatttgtgtctgcttgataaaaagcagtaaagatttgagactgctgctgtatttcaatccctttaccgctatcgctaaccagaaatattaattgttcctcatgacgcttgaccgtcagacgtatccctccggtttcggtaaattttaccgcgttcccgagtaaattaaccaaaatttgccgtaaacggatactgtcggtatgaaaatagagagggacatgttgaccgacaaaagtacgtaatgacagttttttgctttgcgctggcccctggatggtttgcattgcctggtccagtaacggcagtaacgctgtttcttccatatgtaatgtgaaatgaccagactcgatgcgtgaaaaatccagcagattattaataatagctaacaaagacagtgtacaatttctggcggtatcagctaatccttgttgctctatgtttaaaggggtggtttgtaataattcaattgcaccgagtacgccattcatcggagtacgtaactcatgacttattaccgtaagatgaatgcttttacgtttgttagctcgctcagcgcgtttttttgcttcatttagcgcctgggtgcgctctgcgactttgttttccagattgtcgtattggacttgtagagtatcaagcagttggttaaaagcaccggcaatactatctaattcatccagtcgttgtgctggtaaacgtgtgctcagcggtgcagttgcggttttattaatgacatcgacaaaacgccataacggtttggccagtgagcgatgtagtaaccagcaaaaagccgacgtcatcaacaccaatgctgttaatgtaaaggggatttgttgaaggataatttttaagatgcgattatgtagattaccgtatgggtacagcgtaaccagactccatccggggccatgcaaggttgtgcgtaatatcagaaatccgggaatttgctgccatccatcatgcagcgttacattttctaactgtgtacgtattttttgcgggatgtatgaaaacggcaataagtggttgttttgatccagccatactcgaatactatcatctaatggcaggtggctcttagtaatgagatcgggaagtttaaccgtcacctcaaaaaatacgccttgctgatcggcaaccgcaacggaagcgtgccatcctttgccgtttatgtattctggttcactccagtaaaacccggcatgggttgggtataaaggaaagctttttcgcgttaaaggctgtagagttgaataatctgaagggttatcagtagataataacgaaatctcatttttatgattaagaataaaactatcgcgacgaaagctattttcatcgatatcagaggactgcagaaagagacggtgcttctctccgtttagcgtcggcgtgcaatttgaaggaccgacagatagatgccggctcacctcagggaaaatatcgttatgatgaatctcagtcgctaatgagcattgatacattaaatttttagcgtcacgttcagcttcttcaaaccgttgattgcttagtacaatattcatctcggatagaacggataaatcctctattatatgctgccgtttctgaaccattgatatataagctgcggtaagcacagatagcagccaaataattattgttgttaataaaaataaaaaagttagcctgattactaaagatgtttgcagcgtattcttgagattgagcaaattcataatgcttccctccagttgcctgttgcaaaatctttggcacttgatcactatcgcagtacatatagtttcatcagaagattaatcgatggtgttatcattaggaagataaatttcttcatatataacccagtcgatgactacaattactttttaataagatggcgatgtaaaaacatcgtaacagtttatttaataaataatttttcaaattgtaagtttttatgtcaatgctgaaaatgtaattgtgaatttatcggaaaatccgaatgatagaatcgcctgtgacaaggtatatgtagacagcatcctgatattgtacaagaagagtatagtcgaaataaatgtgaatcaggctttttacggatgtggttgtgagcgaatttgatagaaactcccatttatgtctgaggagggattcatgctggcagttttaaaaggcattccattaattcaggatatcagggccgaaggtaatagccgatcctggataatgactattgatgggcatcctgccagaggagaaattttctcagaagcattttctatttctttgttcttaaatgacctggaaagcttacctaagccttgtcttgcctatgtgacactactgcttgcagcacacccggacgtccatgattatgctatacagctcacagcggatgggggatggttaaacggttattataccacaagtagtagctctgagcttattgctattgagatagaaaaacacctggctttaacttgcattttaaaaaatgtaatacgcaatcaccataaactttattcgggtggggtataaaatggtagtaaataaacgtttaatcttaattttactatttatactcaatacagcaaagagtgatgagttatcatggaaaggtaatgacttcaccctttatgccagacaaatgccattagcagaggttttacatctgctctcagagaactatgatacggctattactattagcccattgataacagctacatttagtggaaaaattccgcctggaccaccggtcgatattttgaataacctggcagcacaatatgatttgcttacctggtttgatggcagcatgttatatgtatatcctgcatcgttattaaaacatcaggttatcactttcaatattttatctactggacggttcattcattacttacgcagccagaatatcctttcatcaccgggatgcgaggttaaagaaattaccggtaccaaagctgtggaggtgagcggtgttcccagctgcctgactcgtattagtcaattagcttcagtgctggataatgcgttaatcaaacgaaaagacagtgcggtgagtgtaagtatatacacgcttaagtatgccactgcgatggatacccagtaccaatatcgcgatcagtccgtcgtggttccaggggtcgttagtgtattgcgtgagatgagtaaaaccagcgtcccgacgtcatcgacgaacaatggttcacccgctacacaggcattgcccatgtttgctgccgacccacgccagaatgcagtgatcgttcgtgattatgcggccaatatggccgggtatcggaaactcatcacagaattagatcaacgccagcagatgatagagatttcggtgaaaattatcgatgttaatgctggagatattaaccagttaggcatcgactggggaacggcagtgtcgctgggtggcaagaaaattgcgttcaatacaggtttgaatgacggtggtgctagtggtttttcaacggtaatcagcgatacctcaaactttatggtgcgtctgaatgccctggaaaaaagctctcaggcttatgtactttcccagccatctgtggtgactttaaataatatccaggctgtgctggataaaaatattactttctataccaaactgcagggagaaaaagtggctaaacttgaatccatcactacgggttctttgttacgcgttacacctcgcttgttaaatgacaatggcacgcaaaaaataatgcttaatcttaatattcaggatggacaacaaagtgatacgcaaagcgaaacagacccgctgcccgaagtgcaaaattctgaaattgcttcgcaagccacattattggccgggcaaagtctattgctgggagggtttaaacaaggtaaacaaatccactcgcaaaacaaaatccctttattgggcgatattcctgttgtaggtcatttgtttcgcaatgatacgactcaagtacatagtgtaatcaggctttttttgattaaagcctcagtagtaaataatggcatatctcatggttaatccaaagagttcctggaaaatacgttttttaggtcacgttttacaaggccgggaagtatggctgaatgaaggtaacctgtcactgggggagaagggatgcgatatttgtattccgctggctataaatgaaaaaattattctgagagaacaggcagatagtttatttgttgatgccgggaaagccagagttagagttaatggccgcagatttaatccaaataagccgctaccatccagtggggttttgcaggttgcgggagtggctatcgcgtttggtaaacaggattgtgaacttgctgattatcaaatacccgtttccagatcagggtactggtggttggctggcgtattcttgattttcatcggtggaatgggtgtcctgttaagtattagtggtcagcctgaaacggtaaatgacttacctttgcgggttaagtttttattagacaaaagcaatattcattatgtgcgggcgcaatggaaagaagatggcagcctgcagttgtccggttattgctcgtcaagcgaacagatgcaaaaggtgagagcgactctcgaatcatggggggtcatgtatcgggatggtgtaatctgtgatgacttattggtacgagaagtgcaggatgttttgataaaaatgggttacccgcatgctgaagtatccagcgaagggccggggagcgtgttaattcatgatgatatacaaatggatcagcaatggcgcaaggttcaaccattacttgcagatattcccgggttattgcactggcagattagtcactctcatcagtctcagggggatgatattatttctgcgataatagagaacggtttagtggggcttgtcaatgttacgccaatgcggcgctcttttgttatcagtggtgtactggatgaatctcatcaacgcattttgcaagaaacgttagcagcattaaagaaaaaggatcccgctctttctttaatttatcaggatattgcgccttcccatgatgaaagcaagtatctgcctgcgccagtggctggctttgtacagagtcgccatggtaattacttattactgacgaataaagagcgtttacgtgtaggggcattgttacccaatgggggagaaattgtccatctgagtgccgatgtggtaacgattaaacattatgatactttgattaactatccattagattttaagtgagtggaaaatgacaactttgacccggttagaagatttgctgcttcattcgcgtgaagaggccaaaggcataattttacaattaagggctgcccggaaacagttagaagagaacaacggcaagttacaggatccgcagcaatatcagcaaaacaccttattgcttgaagcgatcgagcaggccgaaaatatcatcaacattatttattatcgttaccataacagcgcacttgtagtgagtgagcaagagtaaagtaaaaatatcttagagcctatcccaccaggcgttaattggcgcagccagtttggacacggatagcgcgcaaaaaccgcagcgtacacgtagtacgtgaggtttgactcgctacgctcgcccttcgggccgccgctagcggcgttcaaaacgctaacgcgttttggcgagcactgcccaggttcaaaatggcaagtaaaatagccctaatgggataggctcttagttagcacgttaattatctatcgtgtatatggaggggaatgatgataaagaaaaaggctgcgtttagtgaatatcgtgatttagagcaaagttacatgcagctaaatcactgtcttaaaaaatttcaccaaatccgggctaaggtgagtcaacagcttgctgaaagggcagagagccccaaaaatagcagagagacagagagtattcttcataacctatttccacaaggcgttgccggggttaaccaggaggccgagaaggatttaaagaaaatagtaagtttgtttaaacaacttgaagtacgactgaaacaacttaatgctcaagccccggtggagataccgtcaggaaaaacaaaaaggtaaagcataatgtcttcaggaaacatcttatggggaagtcaaaaccctattgtgtttaaaaatagcttcggcgtcagcaacgctgataccgggagccaggatgacttatcccagcaaaatccgtttgccgaagggtatggtgttttgcttattctccttatggttattcaggctatcgcaaataataaatttattgaagtccagaagaacgctgaacgtgccagaaatacccaggaaaagtcaaatgagatggatgaggtgattgctaaagcagccaaaggggatgctaaaaccaaagaggaggtgcctgaggatgtaattaaatacatgcgtgataatggtattctcatcgatggtatgaccattgatgattatatggctaaatatggcgatcatgggaagctggataaaggtggcctacaggcgatcaaagcggctttggataatgacgccaaccggaataccgatcttatgagtcaggggcagataacaattcaaaaaatgtctcaggagcttaacgctgtccttacccaactgacagggcttatcagtaagtggggggaaatttccagtatgatagcgcagaaaacgtactcatgaaaaaagacccgaccctacaacaggcacatgacacgatgcggtttttccggcgtggcggctcgctgcgtatgttgttggatgacgatgttacacagccgcttaatactctgtatcgctatgccacgcagcttatggaggtaaaagaattcgccggcgcagcgcgactttttcaattgctgacgatatatgatgcctggtcatttgactactggtttcggttaggggaatgctgccaggctcaaaaacattggggggaagcgatatacgcttatggacgcgcggcacaaattaagattgatgcgccgcaggcgccatgggccgcagcggaatgctatctcgcgtgtgataacgtctgttatgcaatcaaagcgttaaaggccgtggtgcgtatttgcggcgaggtcagtgaacatcaaattctccgacagcgtgcagaaaagatgttacagcaactttctgacaggagctaaaaatgaatcgaattcacagtaatagcgacagcgccgcaggagtaaccgccttaacacatcatcacttaagcaatgtcagttgcgtttcctcgggttcgctgggaaagcgccagcatcgtgtgaattctacttttggcgatggcaacgccgcgtgtctgctatccgggaaaattagtcttcaggaggcaagcaatgcgttgaagcaactgcttgatgccgtacccggaaatcataagcgtccatcattgcctgactttttgcagaccaatcccgcggttttatcaatgatgatgacgtcattaatactcaacgtctttggtaataacgctcaatcgttatgccaacagcttgagcgggcaactgaggtgcaaaatgcattacgtaataagcaggtaaaggagtatcaggagcagatccagaaagcgatagagcaggaggataaagcgcgtaaagcgggtatttttggcgctatttttgactggattaccggcatatttgaaaccgtgattggcgccttaaaagttgtggaaggttttctgtccggaaatcccgcagaaatggctagcggcgtagcttatatggccgcaggttgtgcaggaatggttaaagccggagccgaaacggcaatgatgtgcggtgctgaccacgatacctgtcaggcaattattgacgtgacaagtaagattcaatttggttgtgaagccgtcgcgctggcactggatgttttccagattggccgtgcttttatggcgacgagaggtttatctggcgcagctgcaaaagtgcttgactccggttttggcgaggaagtggttgagcgtatggtaggtgcaggggaagcagaaatagaggagttggctgaaaagtttggcgaagaagtgagcgaaagtttttccaaacaatttgagccgcttgaacgtgaaatggctatggcgaatgagatggcagaggaggctgccgagttttctcgtaacgtagaaaataatatgacgcgaagcgcgggaaaaagctttacgaaagagggggtgaaagccatggcaaaagaagcggcaaaagaagccctggaaaaatgtgtgcaagaaggtggaaagttcctgttaaaaaaattccgtaataaagttctcttcaatatgttcaaaaaaatcctgtatgccttactgagggattgttcatttaaaggcttacaggctatcagatgtgcaaccgagggcgccagtcagatgaatactggcatggttaacacagaaaaagcgaagatcgaaaagaaaatagagcaattaataactcagcaacggtttctggatttcataatgcaacaaacagaaaaccagaaaaagatagaacaaaaacgcttagaggagctttataaggggagcggtgccgcgcttagagatgtattagataccattgatcactatagtagcgttcaggcgagaatagctggctatcgcgcttaatctgaggataaaaatatggaagcgagtaacgtagcactggtattaccagcgccttccttgttaacaccttcttccactccatctccctccggggagggaatgggtactgaatcaatgcttctgttatttgatgatatctggatgaagctaatggagcttgccaaaaagctgcgcgatatcatgcgcagctataacgtagaaaaacaacggctggcctgggaactgcaagtcaatgttttacagacgcaaatgaaaacaattgatgaagcgtttagagcatcaatgattactgcgggtggcgcaatgttgtcgggtgtactgacgataggattaggggccgtaggcggggaaaccggtcttatagcgggtcaagccgtaggccacacagctgggggcgtcatgggcctgggggctggtgtagcgcaacgtcaaagtgatcaagataaagcgattgccgacctgcaacaaaatggggcccaatcttataataaatccctgacggaaattatggagaaagcaactgaaattatgcagcaaatcatcggcgtggggtcgtcactggtcacggttcttgctgaaatactccgggcattaacgaggtaaacatggtgcaagaaatagagcaatggttacgtcggcatcaggtgtttactgagcctgcatatttaggggagaccgccatattacttgggcagcagtttatattatcgccttacctggtgatctatcgtattgaggcaaaagaaatgattatttgtgagttcaggcgcctgacgcccgggcaacctcgaccacagcaattgtttcacttactgggacttttacgcgggatatttgtgcatcacccgcagttaacatgtttaaagatgttgataatcaccgacgttctggatgaaaaaaaagccatgctacgcaggaaattattgcgcatcctgacagtaatgggagcgacctttacacagcttgatggcgataactggacagttttatccgccgagcatcttatccagcgacgtttttaaatgaccttcctgacgtaaatcattatcacgtgaaaataacaatcaataggtatgatgatgaaagaagatcagaaaaataaaatacccgaagacattctgaaacagctattatccgttgatccggaaaccgtttatgccagtggttacgcctcatggcaggagggggattattcgcgcgccgtaatcgattttagttggctggtgatggcccagccatggagttggcgtgcccatattgcattggctggcacctggatgatgcttaaagaatacacgacggccattaatttctatggacatgccttgatgctggatgccagccatccagaaccggtttaccaaacgggcgtctgtctcaaaatgatgggggaacccgggttggcgagagaggcttttcaaaccgcaatcaagatgagttatgcggatgcctcatggagtgagattcgccagaatgcgcaaataatggttgatactcttattgcttaaataacagaacgaaatatgaaaattcatattccgtcagcggcaagtaatatagtcgatggtaatagtcctccttccgatatacaagcgaaggaggtatcgtttcctccccctgaaattccagcgcctggcacccccgcagcccctgtgctgcttacgcctgaacaaataaggcagcagagggattatgcgatacattttatgcaatacactattcgtgcgctgggtgcgacagtcgtgtttgggttatcggttgctgcagcggtaatttctggcggggcaggattacccattgctattcttgcgggggcggcgctcgtgattgctattggggatgcttgctgtgcgtatcataattatcaatcgatatgtcagcaaaaggagccattacaaaccgccagtgatagcgttgctcttgtggtcagtgcgctggccttaaaatgtggggcaagtcttaactgcgctaacacccttgctaattgtctttctttattaatacgttcaggaatcgctatttctatgttggttttacccctacagtttccactgcccgcggctgaaaatattgcggcctctttggacatggggagtgtaattacctccgttagcctgacggcgataggtgcggtactggattattgccttgcccgcccctctggcgacgatcaggaaaattctgttgatgaacttcatgccgatcccagtgtgttattggcggaacaaatggcagcgctctgtcaatctgctactacacctgcattaatggacagttctgatcatacatctcggggagaaccatgaaacctgttagcccaaatgctcaggtaggagggcaacgtcctgttaacgcgcctgaggaatcacctccatgtccttcattgccacatccggaaaccaatatggagagtggtagaataggacctcaacaaggaaaagagcgggtattggccggacttgcgaaacgagtgatagagtgttttccaaaagaaatttttagttggcaaacggttattttgggcggacagattttatgctgttccgctggaatagcattaacagtgctaagtggtggaggcgcgccgctcgtagccctggcagggattggccttgctattgccatcgcggatgtcgcctgtcttatctaccatcataaacatcatttgcctatggctcacgacagtataggcaatgccgttttttatattgctaattgtttcgccaatcaacgcaaaagtatggcgattgctaaagccgtctccctgggcggtagattagccttaaccgcgacggtaatgactcattcatactggagtggtagtttgggactacagcctcatttattagagcgtcttaatgatattacctatggactaatgagttttactcgcttcggtatggatgggatggcaatgaccggtatgcaggtcagcagcccattatatcgtttgctggctcaggtaacgccagaacaacgtgcgccggagtaatcgttttcaggtatataccggatgttcattgctttctaaattttgctatgttgccagtatccttacgatgtatttattttaaggaaaagcattatggatattgcacaattagtggatatgctctcccacatggcgcaccaggcaggccaggccattaatgacaaaatgaatggtaatgatttgctcaacccagaatcgatgattaaagcgcaatttgccttacagcagtattctacatttattaattacgaaagttcactgatcaaaatgatcaaggatatgcttagtggaatcattgctaaaatctgaagttattagcgacgatgttcgacggttgctgctggaaatcatgtttgcgggcgttaaccatagcctgatttcccaggtacatgcgatgttaccagcgctaacggttattgttccggataaaaaattacagttggtatgtctggcattattgttggcgggtttaaatgagccgctaaaagccgcgaaaattttatcggatatagatttgccagaggctatggcgctgcgtctgttatttcctgcaccaaatgaggggtttgaaaattgaatatttctgatatgagcgtagtgcctgtaagcactcaatcttatgtaaagtcctctgcagaaccgagccaggagcaaattaatttttttgaacaattgctgaaagatgaagcatccaccagtaacgccagtgctttattaccgcaggttatgttgaccagacaaatggattatatgcagttaacggtaggcgtcgattatcttgccagaatatcaggcgcagcatcgcaagcgcttaataagctggataacatggcatgaaggttcatcgtatagtatttcttactgtccttacgttctttcttacggcatgtgatgtggatctttatcgctcattgccagaagatgaagcgaatcaaatgctggcattacttatgcagcatcatattgatgcggaaaaaaaacaggaagaggatggtgtaaccttacgtgtcgagcagtcgcagtttattaatgcggttgagctacttagacttaacggttatccgcataggcagtttacaacggcggataagatgtttccggctaatcagttagtggtatcaccccaggaagaacagcagaagattaattttttaaaagaacaaagaattgaaggaatgctgagtcagatggagggcgtgattaatgcaaaagtgaccattgcgctaccgacttatgatgagggaagtaacgcttctccgagctcagttgccgtatttataaaatattcacctcaggtcaatatggaggcctttcgggtaaaaattaaagatttaatagagatgtcaatccctgggttgcaatacagtaagattagtatcttgatgcagcctgctgaattcagaatggtagctgacgtacccgcgagacaaacattctggattatggacgttatcaacgccaataaagggaaggtggtgaagtggttgatgaaatacccttatccgttgatgttatcgttgacaggactgttattaggagtgggcatcctgatcggctatttttgcctgagacgccgtttttgagccgacctgatcccgaggtgttgcaactttatcgttatttctggcaacctgctcgttacgctgtaccggaatggctggataagctgggctttcatctttcaaactgctggcgttatggcgatcggcccgagttggatcgtcttcttgacagagcgttaaatagactaagaggaagctctgttattccagcctgtttaaatgacaggcaaaaacggcaggttcgtcttgcgccgcgtatatcggcatttgcctttgggctgggattattcaaactcaggtgtagtgactattttatgctaccagagtatcggcaattgcttctacagtggtttagcgaggatgagatctggcagctatatggttggttggggcaaagagatggcaaattacttcctccgcaagtgatgcaacaaactgcattgcagatcggtaccgccattcttaatcgggaagcgcatgacgatgcggttttacatgcgctattagtattattaccccctccgcagcgtatactttggccgaagacttctcttaccgagattatcttcatggagcatttgctatgagttttacttcacttcctctgacggaaattaaccataagctacccgctcgaaatattattgagtcacagtggataacattacaattaactttatttgcgcaagagcaacaagctaagagagtttcacatgctattgtgagctccgcttaccgtaaggctgaaaaaatcatccgagacgcctatcgttatcagcgtgaacagaaagttgagcagcaacaagaactagcgtgcttgcgtaaaaatacgctggaaaaaatggaagtggaatggctggaacagcatgtaaaacatttacaagacgatgaaaatcaatttcgttcattggtcgatcacgcagcgcatcatattaaaaatagtatagaacaggttctgttggcctggttcgaccaacagtcggtagacagtgttatgtgccatcgtctggcacgccaggccacggctatggcggaagagggagcgctttatttgcgtattcatcctgaaaaagaggcattgatgcgagaaacttttggcaagcggtttacgttgattatcgagcctggtttctctcccgatcaggctgaactttcctcaacacgatatgccgttgaattttcactttctcgtcatttcaacgcgttactgaaatggttacgtaatggtgaagataaaagaggtagcgatgaatattaaaattaatgagataaaaatgacgccccctacagcatttacccctggccaggttatagaggaacaagaggttatttcgccttcaatgttagctctccaggagttacaggaaacgacgggggcagcgctctatgagacgatggaagaaataggaatggcgctgagtggtaaactgcgcgaaaattataaattcactgatgctgagaaactggagcgcagacagcaggctttgctgcgtttgataaaacaaatacaggaggataatggggcaacgttgcgtccgcttaccgaagagaatagtgatcctgatttacagaatgcgtatcaaattatcgctcttgcaatggcgcttactgccggcgggttgtcaaaaaagaaaaaacgcgatttgcaatcgcaactggatacgcttacagcggaggagggatgggaacttgccgtttttagtttactggaacttggcgaagtggataccgctacgctgtcctctctgaagcgttttatgcaacaggcgatagacaacgatgaaatgcccttatcgcagtggttcagacgcgtggcagactggccggatcgctgtgaacgggtccgtattttgctaagagcagtagcctttgaacttagcatatgcatcgaaccctcggagcaaagtcgtttggccgcagcattagtacgtttgcgtcgtttgctgttattccttggccttgaaaaagagtgccagcgtgaggagtggatttgccagttgccgcctaatacattactgccgctactactcgatattatttgtgagcgctggcttttcagtgattggttgcttgatagacttaccgctatagtttcttcatcgaagatgttcaatcggttactccaacaacttgatgcgcagtttatgctgatacccgataactgttttaacgacgaagatcaacgtgaacaaattctcgaaacgcttcgtgaagtaaagataaatcaggttttattctgatacctggctttcaatatttaggtaaattggctttctggctcatcatgaggcgtcaggatggattgggatctcattactgaacgtaatattcagctttttattcaattagcaggattagctgaacggcctttagcaaccaatatgttctggcggcaaggacaatatgaaacctatctaaactatcataacggtcgtattcacttatgtcagatactcaagcaaaccttcttagacgaagaactgctttttaaagcgttggctaactggaaacccgcagcgttccagggtattcctcaacgattatttttgttgcgcgatgggcttgcaatgagttgttctccacctctttccagctccgccgagctctggttacgattacatcatcgacaaataaaatttctggagtcgcaatgcgttcatggttaggtgagggagtcagggcgcaacagtggctcagtgtatgcgcgggtcggcaggatatggttctggcgacggtgttattaatcgctattgtgatgatgctgttacctttgccgacctggatggttgatatcctgattactatcaaccttatgttttcagtgatcctgctcttaattgctatttatcttagtgaccctctcgatttatcggtatttccgtctttattacttattactacattatatcgtttgtcactcacaatcagcacatcacggctggtactgttacaacataatgccggtaatattgtggatgctttcggtaagtttgtcgtaggaggaaatctcaccgttgggttggtcgtatttaccatcattactatcgtgcaatttattgtcattacaaaaggtatcgagagggtggcggaagttagcgcacgtttctcgcttgatgggatgccaggcaaacaaatgagtatcgatggcgatttgcgtgccggagttatcgatgcagaccatgcccgtacattaagacagcatgtccagcaggaaagccgctttctcggtgcgatggacggtgcgatgaaatttgttaaaggcgatacgattgccggtattattgttgttctggtgaacattatcggcggtatcattatcgctatcgtacaatatgatatgtcgatgagtgaggctgttcacacttatagcgtactgtcaatcggagatggtttatgtgggcaaattccatcgctgctgatttcccttagcgcgggaattattgtcacccgtgtcccgggtgagaaacgccagaacctggcgacagagttgagttctcaaattgccagacaacctcagtcgctcatattaaccgctgtggttttaatgctcctcgctttaattcctggctttccttttatcactctcgctttcttttcagcgttgttagcattgccaattatcctcattcgccgcaaaaagtctgtggtttccgcaaatggcgtcgaagcaccggaaaaagatagtatggttcccggcgcatgtcctctaatcttacgtcttagcccgacgttacattctgccgacctgattcgtgatattgacgccatgagatggtttttatttgaggataccggcgtccctctccctgaggtgaatattgaggttttgcctgaacccaccgaaaaattgacggtactgctatatcaggaacccgtatttagtttatctattcccgctcaggcggattatttattgataggcgcggacgctagtgtggtgggtgacagccagacgttaccgaacgggatggggcagatctgttggcttacaaaagacatggcccataaggcgcaaggttttggactggacgttttcgcgggcagccaacgtatctctgccttattaaaatgtgtcctgcttcggcatatgggagagtttattggtgttcaggaaacgcgttatctaatgaatgcgatggaaaaaaactactctgagctggtgaaagagcttcagcgccagttacccattaataaaatcgctgaaactttgcaacggcttgtatcagagcgggtttctattagagatttacgtcttattttcggcaccttaattgactgggcgccacgtgaaaaagatgtcctgatgttgacagaatatgtccgtatcgcgcttcgtcgtcatattctgcgtcgtcttaatccggaaggaaaaccgctgccgattttgcggatcggcgaaggtattgaaaacctcgtgcgtgaatccattcgccagacggcaatggggacctatactgcgctgtcgtctcgtcataagacgcagatcctgcaacttatcgagcaggcgctgaagcagtcagccaaattattcattgtcacttctgtcgacacccgacgtttcttgcgaaaaattacagaagccaccttgttcgacgtaccgattttgtcatggcaggaattaggagaggagagccttatacaagtggtagaaagtattgaccttagcgaagaggagttggcggacaatgaagaatgaattgatgcaacgtctgaggctgaaatatccgccccccgatggttattgtcgatggggccgaattcaggatgtcagcgcaacgttgttaaatgcgtggttgcctggggtatttatgggcgagttgtgctgtataaagcctggagaagaacttgctgaagtcgtggggattaatggcagcaaagctttgctatctccttttacgagtacaatcgggcttcactgcgggcagcaagtgatggccttaaggcgacgccatcaggttcccgtgggcgaagcgttattagggcgagttattgatggctttggtcgtccccttgatggccgcgaactgcccgacgtctgctggaaagactatgatgcaatgcctcctcccgcaatggttcgacagcctatcactcaaccattaatgacggggattcgcgctattgatagcgttgcgacctgtggcgaagggcaacgagtgggtattttttctgctcctggcgtggggaaaagcacgcttctggcgatgctgtgtaatgcgccagacgcagacagcaatgttctggtgttaattggtgaacgtggacgagaagtccgcgaattcatcgattttacactgtctgaagagacccgaaaacgttgtgtcattgttgtcgcaacctctgacagacccgccttagagcgcgtgagggcgctgtttgtggccaccacgatagcagaattttttcgcgataatggaaagcgagtcgtcttgcttgccgactcactgacgcgttatgccagggccgcacgggaaatcgctctggccgccggagagaccgcggtttctggagaatatccgccaggcgtatttagtgcattgccacgacttttagaacgtacgggaatgggagaaaaaggcagtattaccgcattttatacggtactggtggaaggcgatgatatgaatgagccgttggcggatgaagtccgttcactgcttgatggacatattgtactatcccgacggcttgcagagagggggcattatcctgccattgacgtgttggcaacgctcagccgcgtttttccagtcgttaccagccatgagcatcgtcaactggcggcgatattgcgacggtgcctggcgctttaccaggaggttgaactgttaatacgcattggggaataccagcgaggagttgatacagatactgacaaagccattgatacctatccggatatttgcacatttttgcgacaaagtaaggatgaagtatgcggacccgagctacttatagaaaaattacaccaaatactcaccgagtgatcatggaaactttgctggagataatcgcgcggcgtgaaaagcaattacgcggcaagcttaccgtacttgatcagcagcaacaggcgattattacggaacagcagatttgccagacgcgcgctttagcagtgtctaccagactgaaagaattaatgggctggcaaggtacgttatcttgtcatttattgttggataagaaacaacaaatggccgggttattcactcaggcgcagagctttttgacgcaacggcagcagttagagaatcagtatcagcagcttgtctcccggcgaagcgaattacagaagaattttaatgcgcttatgaaaaagaaagaaaaaattactatggtattaagcgatgcgtattaccaaagttgagggaagtcttgggttgccatgccagtcttatcaggatgataacgaggcggaggcggaacgtatggactttgaacaactcatgcaccaggcattacccattggtgagaataatcctcctgcagcattgaataagaacgtggttttcacgcaacgttatcgtgttagtggcggttatcttgacggtgtagagtgtgaagtatgtgaatcaggggggctaatccagttaagaatcaatgtccctcatcatgaaatttaccgttcgatgaaagcgctaaagcagtggctggagtctcagttgctgcatatggggtatataatttccctggagatattctatgttaagaatagcgaatgaagagcgtccgtgggtggagatacttccaacgcaaggcgctaccattggtgagctgacattgagtatgcaacaatatccagtacagcaagggacattatttaccataaattatcataatgagctgggtagggtgtggattgcagaacaatgctggcagcgctggtgtgaagggctaattggcaccgctaatcgatcggctatcgatcctgaattgctatatggaatagctgaatgggggctggcgccgttattgcaagccagtgatgcaaccctctgtcagaacgagccgccaacatcctgcagtaatctaccacatcagctagcgttgcatattaaatggacagttgaagagcatgagttccatagcattatttttacatggccaacgggttttttgcgcaatatagtcggagagctttctgctgagcgacaacagatttatcctgcccctcctgtggtagtccctgtatattcaggctggtgccagcttacattaatcgaacttgagtctatcgaaatcggcatgggcgttcggattcattgcttcggcgacatcagactcggtttttttgctattcaactacctgggggaatctacgcaagggtgttgctgacagaggataacacgatgaaatttgacgaattagtccaggatatcgaaacgctacttgcgtcagggagcccaatgtcaaagagtgacggaacgtcttcagtcgaacttgagcagataccacaacaggtgctctttgaggtcggacgtgcgagtctggaaattggacaattacgacaacttaaaacgggggacgttttgcctgtaggtggatgttttgcgccagaggtgacgataagagtaaatgaccgtattattgggcaaggtgagttgattgcctgtggcaatgaatttatggtgcgtattacacgttggtatctttgcaaaaatacagcgtaaacctgataagaaaaataatatgcgaacaatataatagcgttccaggtcgtgtcatgagagatacagtatgtctttacccgattcgcctttgcaactgattggtatattgtttctgctttcaatactgcctctcattatcgtcatgggaacttctttccttaaactggcggtggtattttcgattttacgaaatgctctgggtattcaacaagtccccccaaatatcgcactgtatggccttgcgcttgtactttccttattcattatggggccgacgctattagctgtaaaagagcgctggcatccggttcaggtcgctggcgctcctttctggacgtctgagtgggacagtaaagcattagcgccttatcgacagtttttgcaaaaaaactctgaagagaaggaagccaattattttcggaatttgataaaacgaacctggcctgaagacataaaaagaaagataaaacctgattctttgctcatattaattccggcatttacggtgagtcagttaacgcaggcatttcggattggattacttatttatcttccctttctggctattgacctgcttatttcaaatatactgctggctatggggatgatgatggtgtcgccgatgaccatttcattaccgtttaagctgctaatatttttactggcaggcggttgggatctgacactggcgcaattggtacagagcttttcatgaatgattctgaattgacgcaatttgtaacgcaacttttatggatcgtcctttttacgtctatgccggtagtgttggtggcatcggtagttggtgtcatcgtaagccttgttcaggccttgactcaaatacaggaccaaacgctacagttcatgattaaattattggcaattgcaataaccttaatggtcagctacccatggcttagcggtatcctgttgaattatacccggcagataatgttacgaattggagagcatggttgaatggcacaacaggtaaatgagtggcttattgcattggctgtggcttttattcgaccattgagcctttctttattacttcccttattaaaaagtggcagtttaggggccgcacttttacgtaatggcgtgcttatgtcacttacctttccgatattaccaatcatttaccagcagaagattatgatgcatattggtaaagattacagttggttagggttagtcactggagaggtgattattggtttttcaattgggttttgtgcggcggttcccttttgggccgttgatatggcggggtttctgcttgatactttacgtggcgcgacaatgggtacgatattcaattctacaatagaagctgaaacctcactttttggcttgcttttcagccagttcttgtgtgttattttctttataagcggcggcatggagtttatattaaacattctgtatgagtcatatcaatatttaccaccagggcgtactttattatttgaccagcaatttttaaaatatatccaggcagagtggagaacgctttatcaattatgtatcagcttctctcttcctgccataatatgtatggtattagccgatctggctttaggtcttttaaatcggtcggcacaacaattgaatgtgtttttcttctcaatgccgctcaaaagtatattggttctactgacgctcctgatctcattcccttatgctcttcatcactatttggttgaaagcgataaattttatatttatctaaaagactggtttccatctgtatgagcgagaaaacagaacagcctacagaaaagaaattacgtgatggccgtaaggaagggcaggttgtcaaaagtattgaaataacatcattatttcagctgattgcgctttatttgtattttcatttctttactgaaaagatgattttgatactgattgagtcaataactttcacattacaattagtaaataaaccattttcttatgcattaacgcaattgagtcatgctttaatagagtcactgacttctgcactgctgtttctgggcgctggggtaatagttgctactgtgggtagcgtgtttcttcaggtgggggtggttattgccagcaaggccattggttttaaaagcgagcatataaatccggtaagtaattttaagcagatattctctttacatagcgtagtagaattatgtaaatccagcctaaaagttatcatgctatctcttatctttgcctttttcttttattattatgccagtacttttcgggcgctaccgtactgtgggttagcctgtggcgtgcttgtggtttcttctttaataaaatggttatgggtaggggtgatggttttttatatcgtcgttggcatactggactattcttttcaatattataagattagaaaagatctaaaaatgagtaaagatgacgtaaaacaggagcataaagatctggagggcgaccctcaaatgaagacgcggcgtcgggaaatgcagagtgaaatacaaagtgggagtttagctcaatctgttaaacaatctgttgcggtagtgcgtaatccaacgcatattgcggtttgtcttggctatcatcccaccgatatgccaataccacgcgtcctggaaaaaggcagtgatgctcaagctaactatattgttaacatcgctgaacgcaactgcatccccgttgttgaaaatgttgagctggcccgctcattattttttgaagtggaacgcggagataaaattcctgaaacgttatttgaacccgttgcagccttgttacgtatggtgatgaagatagattatgcgcattctaccgaaacaccataaatgcttttggtatgcttcttcaggccactgcgaaggttaagagggtaatagcgtatagagcagtgcttgacgataaaggtgagagactgaaaataatcgcttttagcctggcacaagcaccagatagcgtattataaaattaaacaagataatggattggtgcgtctgaatggactcgaaccatcgacccccaccatgtcaaggtggtgctctaaccaactgagctacagacgcattaaaatgatggtgcgttcaattggactcgaaccaacgacccccaccatgtcaaggtggtgctctaaccaactgagctatgaacgcaacgttgtaggtgacaacggggacgaatattagcgtcacaaccgcaatgaggcaagagggaaatcgcaattttcttcctgaaatcacctgattgcggtggaaatatgcaacatgtcgagaaaatagccgccatgcgacggctatcgtcgtattatcgcgcagcgcgctgcaaaatgatggcggacggctgacgttgtagatagcgcatccgtagcatcattaacaccgccgccgaggtcaggccgatgatgaaccccatccagaagcctgccggtcccatacgatccaccaccaaatccgttaacgccaggatataaccgctgggtaaacctaacacccagtaggcggtaaaggtgataaaaaagatggaacgcgtatctttataaccgcgcagaataccgctgccgataacctgtatagagtcggaaatctggtaaaccgcagcgagcagcattaattgcgcggcaagcgccacgacctcagggttgtcattgtagagcaaagcaatatgcttacgcagagtaacggtaaaaatagcggtaaccacagccatacaaatgccgacgcctaaaccggtacgcgctgcggtttgcgcatccagcgttgagccctggcccagacgataacccactcgaatcgttaccgccgcagccagcgacatcggcagtacgaacatcagcgagctaaagttaagcgcaatctgatgaccggcgacatccacaatacctaatggcgaaaccagcagcgcaacgaccgcaaataacgtcacttcaaagaacagcgccagcgcaatcggcaaccccagttgaatcaggcgcttcatgacgacgctatcgggtttgccaaagcctttttcattacgaatatcacgcattgaacgcgcgtgtttaatgtaagaaagcatggcgataaacatcacccaatagaccgccgcagtcgcaacgccgcagccgataccgccgagttccggcataccaaaatggccatagataaaaatatagttcaccggaatattcaccagcaggcccaaaaatcccatcaccatacccggtttggttttggccagaccttcgcactggtttcgcgctacctgaaagaaaaggtatcctggcgcgccccacagcagcgcgcgaagataacccacggctttatcggccagcgccggatcaatattatgcatagagcggataatgtatccggcattccacaggacgatcatcaccagcacggagacaaagcccgccagccagaacccttgtcgaacctgatgcgcgatacgctcacgacggccggagccattgagttgcgcaatcacaggcgtcaaggccagcagtaagccgtgaccaaacaaaatggcgggaagccagatagaggtgccgatagcgacggcagccatgtccgtagcgctatagcctcccgccatgacggtatcgacgaatcccattgcggtctgtgccacttgcgcaaggatcaccggtattgctaacgctaataactgacgcgcttcactggtatacttctgcacgtattcaccttttattttgttgttatatgaaagactaaaaagccgccgaagtggcagccaaaagaaatagcaggggaaatttcagtctattgtagcggggtattactatttctccagtgaaaaaacagttgttaacggcgcattgctggcaagctgtttttccacctgctattgtgctgaacagttctgcttttatttatttcaggagttgaagatatgtttacggggatcgtacagggtaccgcgaaactggtatcgattgatgaaaaacccaactttcgcacccatgtggtgacgttacctgactacatgctggaggggctggagacgggggcgtcggtagcgcataacggatgctgtttgacggtgactgaaataaacggtaaccagataagttttgatctgatgaaagaaacgttgcgcatcaccaatctgggcgcgttgagggtaggtgatgaggtcaacgtagagcgcgccgccaaattcagcgatgaaatcggtggtcatctgatgtcggggcatattattacgacggcggagatcgcgaaaatcctgacctccgaaaataaccatcaggtgtggtttaaagtgcaggatgcgtccctgatgaagtatatcctgtacaaaggctttatcggcgtcgacggcatcagtttgaccgtcggcgaggtaacgccaacgcgcttctgcgtgcatctcattccggaaacgttggaacgtactacgcttggcagaaaaaaactgggtgagcgtgtgaatatcgagatcgatccgcaaacgcaggcggttgtcgataccgtagaacgcgtactggctgcgcgagaaaatgcggtcagaaatcaggccgacattggctaacggaaaataagattcccccgcatgaaatgcgggggagatgattagcgaggaacgcgcagtccgttttcaacgccgcgcgtaaataccacctgccaaagctggatatcacgcgcgcgaaacgcacccgcgcaggcgttgagataatagctgaacatacgtttaaagcgctcgttataattgcccgcaatctctggccaggcattgataaagcgctcatgccacgccatcagagtcgtgtcatagtcggcgccaaagttatgccagtcttccattacaaagtgtgattcgctggcctcggcgatttgacgaacagacggcaaacaaccgttggggaaaatatacttattgatccacggatcgacattatgatcggtttttttagaaccaatagtatggagcaggaaaagaccatccggttttaaattcctgtcaacgacctcaaaataggtgttgtagttttttggcccgacatgttcgaacatgccgacagagacgattcggtcaaactgatcgttaaggtcgcgataatcttcgaggagaatggagacatccagaccttcgcaacgcgtctgcgccattttttgttgttcagcggagatcgttacgcccaccacgctaacgccataatgggtcgccatatattgcgacaggccgccccagccgcagccgatatccagcacacgcatccccggttgtagctgtagcttttcgcaaattaatttcagcttggcttgctgtgccgcttccagcgtatcggcatctttccagtaggcgcaagaatattgcatatagggatcgagcatacgggaaaaaaggtcattaccaagatcgtaatgttccttgccgacaatccaggcgcgttttttactttgtagattaatcagacgcgcgccgaggatacggagcgtatctttaacatggtgggggagttgattttcaagaccggcacgtaagactttgctgaagaaaatatccagacgctcgcattcccaccagccatccatgtaactctcacctaaccccaacgatccttcctgaaggacgcgtttaaaaaaatcgggattcttaacacgaatgtcagacggggcggaaccattaattgtaatatccgcgcgacttaacaattcgttggcgattcggtaccagttatcatccggtacgctgacttcttctatacacgatgaactcatagtttctccatcactggacggtgatcagaaccttaaaacagcgtagacgcttttttggctttgtgagaaatcccacggacaattccgtgagccagttatccgacgtagaacagaggaagggaggagcccttgccgaaaaggccatccatggtgaatcgggaacgctccggttcccgttaatgcctaataattatcgtaatataaacaaccgggaatcagtataggccgcaatttttgatgattcaaccgaaaattgttagcgtgctaattaccagcggttaacaagtctttagtgagacttgtcgtgggcgacattggcatggggaaatccggtctcagcgcaatctgcatgagactgcattttgtaacctaacgccgccagaacaacggtagagagcattacgctggtggtggtcagcagcggcgtgctgatgagccatgaaaccaccaggcttgccaggaaacataaccccagttgcagcgtattttgtagcgccgcagcgcgccccgtggcttgagggaaagggcgtaacgcttgcgcgacgacgatagggtagatggcaccattagcaatcgccattacgcagaaaggaatcaggatctccaccagtgaggcattattcagaaggcccgctccccaggtggcgataacgctcagcgcatacagccctaacagccacggaagcaattggtagccctgccatttttgtagcgccgcgcggcaaccatatccgccaatcagaaaagcgatggtttgcggaacatagctcaggccaatcactgccgggctgtaacccatcgcgctgagaataaatggggaccctgttagccacgcaaaaaagctggcggaacaggcggcataaatcagcacattaccgcgataggttttagagcgtaacaacgtcgcgaaagtgagtttatcctgtccttcggtacgcgcttttcccgatggttttaagcgcagcgctggcaacatcagcaacaacgtaatcacgaacagggtggcgaaaatcgcctgccatgagaaatgcgtcagtatccagcttcccagtaagggcgcaagcgccggggataagcccaccagtggcatgatcgtggcgaagatacggttaattttttgcgaaggataataatcggtcaccagcgcttgccagattaccgttgccgcgcaaacgccgacggcctgcacgaagcgcagcgtcagcagtgctgccgcgctttctacccacagcatccccagacttccgagcgcaaagatagataaccccagcagtaaaatcggtttacggccataacgatccgatagcggtccccaaagtagttgcgcgacggcaaagccagctaaaaacaggctgaggctggcgctgaccgcggcggcaggcgtttgtaaatccgcctgtatggcggcaaacgcgggtaggtacatgtccgtagccagaaatcccagcacgctaaggccggctaaccagactaaaaaaccttttccaggttgcatatttgtttctctttcttatcagacagacattgtcgcagagtgtagggagtgaaattacggttgtgaaacgttaatatttgtccagtgaattcaaaatttttgtaggcaaattatgtggtcggaatactcgcttgaagtggttgacgccgtggcgcgcaatggcagttttagcgcggcggcgcaggaactgcaccgtgtgccttcagcagtcagttacaccgttcgtcagttagaggagtggctggccgtaccgctttttgtacgacgtcaccgtgatgttgaactgacgcctgctggcgtctggtttttaaaagaagggcgttctgttatcaaaaaaatgcagatcactcgccagcagtgtcagcaaattgctaatggctggcgcgggcagttagctattgcggtggacaatatcgtcagaccagaacgtacccggcagatgatcgtcgatttctatcgccattttgacgatgtggaactgctggtttttcaggaggtgtttaacggcgtctgggacgcgctctccgacgggcgtgtcgaactggcgattggggcgacgcaggcgattccggtaggggggcgttacgcttttcgggatatggggaccctgagctggagctgcgtagtggcaagcgatcacccgctggcgtcgatgcctgggccgttaagcgatgataccctgcgcaactggccgtcgctggtcagggaagacacttcgcgaaccttaccgaaacggattacctggctgctggataaccaaaaaagggtcgtcgtaccggactgggagtcatcggcaacctgcctgtcggcaggactatgcgtgggaatggtgccgacgcattttgcccgacagtggatagacagcggaaaatgggtggcgctgacgttagagaatccgtttcccgatgcggcctgttgcgtgacgtggcagcaaaacgaggcctcgcccgcgctggcatggctgctggactatttgggcgatagcgaaacgttgaatcgggagtggctgcgggagccagaagaggctcccgacagcggggattaacgccgatagtcgcggaacgggccgtcagcgaccgagcgacgctcaaccaggcgtggatgaacttcaatagactgtgactcttcacgcttattgacgatgcgatccaatagcatattaaatgcggtttcgcctaaagagtctttgggctggtgaatcgtcgtcagcgccggggtaaagtaacgggcgttacgcacattgtcataaccgatcaccgaaacgtcctgcggtacgcgaagccccatttcgtcagccgcgcaaagcgcgcccatcgccataatatcgccgccgcagaaaacggcggtagggcgatgtgactgcgataaaatttgctgcatcgcgtggtaaccggattccggctcgaagtcgccctgaacaatccagttgtccggcacgttgatcagcgcctcctccatggctttcataaagcctgccagccggcccgcgccggtgttgcgctccagcgggccgggaataacgccgatatcccggtggccgcgctcaaccagataacgacccgccatatagccgcctgcaaaggcgttatcaatcaccgtgtcggtaaaatcggccttcgcctcgccccagtccatcaccaccatcggaatatggcgatactcttccagcatggaaagcagaggttctggatactcagaacacatcaccagcaggccatccacgcgcttttgcgccatcatggacaggtaggcgcgctgtttttccaggttattccaggcgttgcctaaaatcagcgtatagcctttctggaaacagtttttttcaaccgcctcgataatttcggcaaaataggccgcttcgctgctggtcgccagtaagcctatcgacttggtatggttaaccttcaggctacgcgcgacggcgctgggagagtagtgcagctctttaattgccgcccagaccgcgttacgcgtttcttcagcgacaaaacgcgttttgttgattacgtgtgatacagttgtagtggaaacgtttgcccgtttcgctacatctttaattgttgccattacatttcactccagaccctcgctaagctcctgagaaacgccaggtaaacgtttgcctacacacaccctaatcgcaacatcagggttgcggcacgccggaaaaacgacacggaacgtcaggaaggggtcaatggccgttacgctaattcagtaagcctggaattttgtctgatcttgaggaaaaggggaagcgttaaaaacagttatcaatataaaacatgagagatttttgtgcgggaatgtgcaaaaatgcgctatatcactttttgtgtgggaataaaaaggagaaaacttgatgagtaccgacctgaaattttcgttgattactacgctgattgttctgggcgtgattgtcgcaggtggattaacggccgctctgcactgatttcctctcttctgagggtgggcgtctcctctattctatccctctctaaaacgcagaaggcgtaccttctgcgtactcagacttatgcggcgagatttttcgcaacaaattcccagttaaccagcgcccagaaatgctccagatagtttggacgggcgttgcggtagtcgatgtaatacgcgtgttcccacacatcaaccgtcagcaacggcgttgcatccgtagtcagcggcgtaccggcatttgaggtagaaacgatagccagtttgccatcagcgctttttaccagccatgtccatccggaaccaaagtttttgatagcggcatcggtgaattgcgctttaaattccgcgaagctgccaaaagatgccgcgatagcatcagccagtttcccggtcggttcgccgccagcgtttggcgccaggcagttccagtagaaggtgtggttccacacctgagcggcgttattaaagatgccgccttcggaagtgcgcacgatctcttccagcgatttgccttcaaacgccgtgcctttgatcaaattgttaagattggtcacgtaagtctgatgatgtttgccatagtgatattccagcgtctcagcagaaatatgcggcaccagagcatctttggcatacggtaatgcaggtaattcgaacgacattgcttctctccttattattaatattgcgcacgcacaatacccctggtgcgcgtaaggatagggtagcaaattgagcggtggcgcaaaagaagaagttatcctgtcgttaaacgacaggataaaatattagcgaattgttttaggcgtcatcacccggcgggcgccgacataatgacgttgccagtattcttcgttcagtgaggtgatcttaatttcctgaccgctgcgcggagactggataaacttaccgttgccgacatagacgccaacgtgatcggcggtgccgcgcccctgcgtacggaagaacaccagatcgccgtttttcaactcgctacgctcaatgggcgccgcgtcacgcaggtgatacatctcattcgccgttcgggggatacggatcttcactaaatctttataggcataataaaccagaccgctgcaatcaaaaccggtgcgcggcgacgcgcctccccagtgatacggtttaccaatctgattcatgagtttggacatcgcggttttcgtcgctttttgtacttttgcacgatgcgcatcggcaatagagaccggcaatgttcctttccccttcacgcagtgcggcttacggcctttacgcgtcgtgcatttttccgttacgtcgagggcggcgattgacgtgggcgcggttctgttacgacgatgcgtcgtatgacgagatttcgtggaggcggtggtacgttttggcgtagaagcggaagaagaacggctggtttttgaggttttttttacgttttttttgctggttttactgatctttttcgttgtgcttttctttttatctgccgttttcgtgacatgagaaacagcaggcgtcgctttggcttgcctggaagcatgggccattggcgtaaaggggagagtagtaaaaagtaaagcacagagcgtgatcgagattttgtttatccgcgccactgagcaatcctctgttaaaggcaggcgattcatgcctgcgtatgatttacaaaacctgataattctaatctacaaaagcacagattggtaattgcttttggtttctgaagctgtgtttcgttaacagatgtaaaaaaatagcaattaatgctaaacacgaacgcgttatctacaaatcactgcgcggcaacccgcttaaaagatattttgtatacaacttattcccgcagacggtaaaataataaggcatgatgaaaatgttattttccgttgccagcctgacccgttacaatgacaggcttcagtcgtaaaagtagtttaaggaagcgagacaatgagcaccactatcgaaaaaattcagcgccaaatcgctgaaaacccgattctcctgtatatgaaaggttcaccgaaactgccaagctgtggtttctctgcgcaggccgttcaggcgctttcagcctgcggggaacgttttgcctatgttgatatcctgcaaaacccggatattcgcgctgaattaccgaaatacgccaactggccgacattcccacaactgtgggtggacggcgagctggtcggcgggtgtgatattgtgattgaaatgtatcagcgtggtgagttgcagcagcttattaaagaaactgcggcaaaatataaaactcaggagccggacgcagagtaatctgtgcaaggagaaagcgacctgtaaaggtcgctttttttaccgccatcgtgagcaagagcggcgttgttagcctcgttatttgtccgtcggcaaaggtaacggccagccgcccaggcgcttccagcgattgacaatttcacaaaacagcaccgctgtccgctcggtatcatacaaagcggagtgggccttttcaccgtcaaactccatacctgccgccaggcacgcttttgataacaccgtttgtcccagcgccagtccgctcaatgccgcagtatcaaaggtgacgaacggatgaaacgggttacgtttcagcgaggcgcgctctgcggcggccatcataaaactgtgatcaaaagtggcgttatgcgcgaccataatggcgcggctacaaccgctgtctttgatacctttacgcaccattttgaaaatagcgtgtagcgcctcatattcactcaccgcgccgcgtagcgggttagagggatcgataccgttaaacgcaagcgcttccggctgtaagttggctccagcgaacggctccacatggaaatgcagcgtcatgtccggcatcagccagccttgttcatccattttcagcgtgatggcggcgatttcgagcagcgcatcggttttagcgttaaatcctgcagtttcaacgtcgatgacgacaggataaaaaccacgaaaacggtcgcacagaccggaaagttgagcgttatcggacatctgagtctcttaatacgaaaaaatgcagcgcgtattatggcaaattttacgccgggatgcagtaaaacaacgggcgcagtgacctgcgcccggcgggggatcagttacccagaccgcggcctgcgtctttagcttcaatcaattcgattttatagccatccggatcttcaacgaaggcgatgatggtcgaaccgccttttaccggccccgcttcacgggtcacgttgccgccgttctgacgaatgcgttcacaggcttcagcagcattgtcaacgctcagcgcgatatgcccgtacgcattgcccatgtcgtagctctcaacgccccagttataggttagttcgatgaccgcttcttccgtttccggaccatatcccacaaaggccagcgagtatttgtattccggattctcactggtacgcagcaatttcatgcccagaacgttagtgtaaaaagcgatggaacgctgcaaatcgccgacgcgcagcatagtatgcaataaacgcattttcgttgtccttaaaatagtcaagatattcaaagtatagcggcgatgtgaggccgctatcaatgaaattacagagtagggtagtcagtgtagccttccgcgccgccgccataaaaactttcgggacgctgtggattaagttccgctttacgttgcagacgcgctaccagatccgggttagcgatgtaatcacgaccaaacgccacggcgtcaatcagccctttttcgatcagatcttccgctttttctggcgtataggcgccagcgccgatgatgggaccgtggaaacgcgcgcgcactttttcacggaacgcgtcgctgtacggttcgccgcccgcccagtctggttcagacatatgcagataagcgatgccgcgtttgcctaacgcttcaatcagataaagggcgtcagcttcttcattcgggccgttatcgacattctggaaagtgccgacaggagaaaggcggatgccgatacggtccgcgccccattccttaatgccggcatcaaccacctccagtaccagacgggcgcgattctctacgccgccgccgtaccgatcggtacggtgattagaagacggtgagaggaactggtgcagcagataaccgtgcgcggaatgcagctccaccagatcgaagcccgcctctcgggcattggcgatagcctggcggaaatcgttgacgatcccggggatctcgtgagtatccagcgcgcgcggcgtggaagtctctacgcggatggcctggccgttttcgtcacgcaaagaggtgcgggttcccgcattgatagcggatggcgcgacgggcgcttgtccgcctggttgcaggctggcgtgtgaaatacggcccgtatgccacagttgcaccgccatatggccgccctgggcatggactccctgagtgatttttttccaggcggcgatctgctcatcgctgtgtaatcccggtgcgccggcatagcctttcgcctgtgcggagatttgtgtggcttcgctgatgatcaatccagcgctggcgcgttgacggtaatattccgccattaacggcgtaggaatgtcgcccggttcaatactccgcaaacgcgtcaaaggcgccataaatacgcgatttgtcgccgtgatggcacccaccttgaggggggtaaacagttttgctgatgacatagtggctcctgatataagtagaccggtcgtcttgtaataaaggaaataaaaacgcctgttactgctcaggcgttgcaatgatggtcttaacatgcgccaacgcattttccagcggcgcggcgctacgggatattttggcctgcaaattggcgcccagccacagggcataaagtacctgcgcctgtggcaacggctggccggtgaaatgtaaacagtggctattacggccatcttccagcgcgcgtgcaagcagtgccatgatctcctgcgcccctttatccatcgtagagcgcatatcctccgacagatcgcagacttccgctgacagtttcaccgtcaggcaaccgctgatggcgccttgctggcaaaactgctttaacgtttcctgataccaggcgagaagacgatcgcgatgattaccgggaccggaggtgaagtgcgccgtaagacgctgatgatagcaggcgtaatgtcgctcaagcatggcgacgccgaaggcttctttcgagcgaaagtagtgataaaacgaccctttaggcacttgggcggttttgagcaactcgctaagccccatgccggtaaaaccccgttgcatacaaagctgctcgccggtggccagcagatgttcgcgggtatcgtgttcggtttgcttattcatagcaggcagtatagtagaccagtcggtctactacaagcagagttgccataatgtcagttagcgtcttcaatagtcataagcgtcaaacgttgaggaggggatgtggccgagcagttggagttttttcctgtagcaagcccatgtcgcggtatctgccagtctgatgagcgtggcttttgtcggggctgtatgcgcagccgcgacgaacggtttaactggcaaaaaatgagcgatgtcgagaaacaaaatgtactgcggctttgtcgccagcgtttcttgcgtaaaatacgcgcaaataagcctctcccatcggaagatcctcaacaaccttcactcttttaaacgcggaattgcgtatactcaacctcattattctctatgaggaatctgttatggttcagcgtgtcaccatcgctccacaaggcccggagttttcgcgttttgtcatgggttactggcgtttgatggactggaatatgtccgcgcgtcagttagtgagttttatcgaagaacatctggatttgggcgtcactaccgttgaccatgcggacatttatggcggttatcagtgcgaagcggcgtttggcgaggcgctaacgctggcgccgcatttgcgggaaaaactgcaaatcgttaccaaatgcggtattgcgaccactgccagagcggaaaataagctcggtcattatattaccgatcgccgccatattattctgagcgccgaacagtcattaaaaaatctggcgacagattatctggatatgttgttaattcaccgtcccgatccgttaatggatgcggatgacgtcgccgaggcgtttcaacatctgcaccaaagcggcaaagtgcgccattttggcgtttctaattttacgccagcgcaatttacgttgctgcaatcgcgcctgcctttcaccctggcgaccaaccaggtggagatctcgccggttcaccagcctttgttgctggacggcacattagatcaattacagcaactgcgtattcgtccgatggcctggtcatgtcttggcggcggtcggctgtttaatgatgaggcttatcagccgttgcgccaggaactttccgttatcgcgcaagaactcaacgccagttctattgaacaggtggtctatgcctggattttacgtttgccgtcgcagccgctgccgattattggctcgggtaaaatcgaacgcgtacgcgccgcactagaagcggaaacgctgtcattgacgcgtcaacagtggttccgaatccgcaaggcggcactgggttatgacgtgccgtaatcgccaactcgttgactttccgtacatgttttcgccagtggtttacacttaacaggcgaccacatgtaacggaggttttatgaagcgattaagtttagcgatggtgacgctgctggcctgtgcgggtgcgcaggccgccagcgagaaagtagagatgaatctggtgacggcgcaaggcgtaggacagtctatcggcaccgtcgtcatcgatgaaaccgaaggcggcttaaaatttaccccacaccttaaagcgttgccgccgggcgagcatggttttcacattcatgccaacggtagctgccagcccgcgattaaagacggcaaagcggttgccgcagaagccgctggtggtcatctggacccacaaaataccggcaagcatgaaggaccggaaggccaggggcatctgggcgacctcccggtgttagtcgttaataatgatggtatcgccagcgaaccggttactgcgccgcgtctgaagtctcttgatgaagtgaaagataaagcgctcatgatccatgtgggcggcgataacatgtccgatcagccgaaaccgctcggcggcggcggaatgcgttacgcctgcggcgtcattaaataacccggagccagtgttccctgcgctggagcctgttccagctgcgacagcgaacagtgtaaacgccagataatcgccgccagctcatgcgcggcgggttgatgatgatgtgcgagcgtgtcgcagatacgctgtagttcctgtagcgtgacggcaagcgggcgttgctgcacgccgcgctcgctcatcacatcgcgcagcagggatatacaaatatcccgcacccgggaaagcggatcggaacgcgactcccaggcgcgcagctgccacaccacatgcgagcagttcagcagcaccactccccaacgtaataaccaccggcgcgccagcgcatcctgactattgctgagctgactgacgtgatgataggtcagcgattcaaactcgctttcgttatgggaagggtgacggctaagctgatcgacgaaatcccggcgtagcgcgcggatatggcggcggctttttacggcatcggaaccggggcgcaaaatcgcaaacgccagccaggaaatcgcgacgccgacgatcttggcggtattatcgttaaggaagtcggcgaagtcgtacaccggtggattggtcacggcgatgaatgagcccataaaaacgataagctgcccccacagtcccgccagcttaggcatctgcagtttaagcagttgcatcgtgacgaacagcggaaaaaggaaaagcaagaattgccacagatcggtgatttgcaccatcaggccaaatttcaccacgaagctgaataaggacagcagcactaaagtacgcatcaataaggaaagcgacttaaacggcgtggcgacgatggagtagaggacgcaactgatcgccgccagggttaatgcgccgggcccggattcccattgcgcgccaatactccaggcgccaatcaccgtgagcgtgcaaaaggtacgcacgccgctccagatggcctctgcgttatccgtatgccgcgcaaggccgggagtgcggcggatatggatttgatccaccggcgcgccgctttcgatcagatataactgacggctgctgcgcagatatagctggcaaaaatagcgtaattgctgccagaacgcgaggtgacgataatcctgttcatcctgcgggcgtagcggcgcaataatctgcgccacggtgtagctgtccgcgcgcggttttgccaactcagctaagagttgctcaatgacttcgcggctgttttccggcggcgtcggccagtttaaaagcattctacgcagactggagatcacgctggttaaccgtaattgctggtgtaacaatgcatttagcaatgcattctggcggcgaaaacggtagtgactccagaaggcctgaatacgcagcaggttcatggtcaggatttgcccaatgaccccctcatgcgcggagcggatagcgtcagtagtctccggctgccacagtagactggcatgttccagcaagcgcgcatgcatgtttttaaacgcggtgagcagggcggtaccatccgatgtgctgggtaggatcatcatcatcatgccgccacagaggatgccgacgataacttcacatacacgtgcctgggcgatatcccacaactgcgtgatttctacaatattaaccatcgggaacgcgatgatcgccgccgtgtagccggacaactggaaagcataagcggcattattggtaaaatgcgcgcaggcccaggtacaaaaaccgatccaggcggccatgctaaataagaacaaccagggttcattcagcgtatggccagcaataattaacgcggcggtcgcgccgagtaaactcccggcaatacgccccagacttttactgattacgccgcctacggtcggaaagctcaccactgcggccgaagtcattgcccagtagggctcatccagattgagataataagcgaatgtcagcgcgagacacatggcaatggtattgcgcaacgcgtaacgccactggccggaggtcgctttaaaccagggcgtatttcgcagggccggcagggagagtttcattaccgctgtccaatggctacgctgcaggtagtgccggagacgagcgtgatatcctgcggtaaagcgtcaaattcgatacgtaccggtacgcgttgcgccagacgtacccacggtacgttgggtttgatatcgggcactaaaccggagtcactttccacgctttggtcgtaaatagcgcgcccgatactgccaacgtgaccctgtaacttaacattgccactatacagtgttattaatgcaggctcaccttcgcggatatggcgtagtttggtttcttcgaaatatcccattacataaaatgaatggctatctaccagggcgaaaagtggcttaccggtgctggcataatcaccggtacgcgtggaaaggttggtcacccagccggataccggcgcttttacttccgtctggctaagctgccactgcgcctgttttaacgttgccagtgcgacatctacgttggcctgcatcgctttaacattcagattggcgctatccagatcttcagcagagatgtagttacgcgataaatgtcgacgtcgatcggcttcattattcgcttttgccagatcggactgcgctttggccaactgcgcctgcgcgttaagttctgcaatatggaagggcgttttatcaatgacaaagagaacgtccccggcgttgacgaactgattatctttgatattgagttgggtaatgctgccagaaacctgtggcgttacgctgacctgttccgcgcggattttaccatcgcgcgtccacggtgactgcatatagtaattccataaccaccacgcggccagaacggcgacgacggcgacaatgagagtagaaaaatattttattgtttttaacgacatatttaccacgcgatcagtaaaacgaggcccagacatacgcaaagcgtaaagagggagagatccattaacaggggatgccagatttcatcagagtatatccggtcacgcaggagtcggtgaataaacaaccagataacgaacccaagcgcaaaggctttaaagaatggcggaaagtaaacagatgctcccaacatgagatcttgtaagggcaatcctgtggcgttgagtatacacttcacaagcaatgttcctttgcgtcagacatcgatgctttagttttagccaaaactgaagctacaggtgccaagtgcgcactatgtctgaaaaaatgtctattggtaagcaaatttagcaatacatttgttttgagaatacaaatactgcacactattctaaaatcagcataataacttagcaagctaattataaggagatgaaattggaatcgccactaggttctgatctggcacggttggtgcgcatttggcgtgctctgattgaccatcgcctcaagcctctggaattgacgcagacacattgggtcacgttgcacaatattcatcaattgccgcctgaccagtcgcagattcaattggctaaagcgataggcattgagcagccatcgctggtacgcacgttggatcaacttgaagataaggggctaatttcgcggcaaacctgcgccagcgatcgtcgcgctaagcggattaaactgaccgaaaaagcggagccgctgatcgctgagatggaagaggtcattcataaaacgcgcggtgaaattttggctgggatttcttcagaggagattgagcttctgattaaacttatcgccaaacttgaacacaatattatggaattgcactctcacgattgaggtgcaggggcatacgtgtggccatgtgaccacacgtaaagcctggtttagcgtggagagacggtaacctggctgccgttgctggccagcacgacacgctgacctgccgagaaacgcgtatttccttgtttctgcacaaccataatggtgttgccatcgtctttacgaatttccagttccacaccctgggttttattcattgcgctctggacgccctggcccgctacgccgccagccaccgcgcctgccgcggtcgccagtgaacgacccgtaccgccgccgatagtgttgccgaggaatccgcccaacaccgcgccgccgatagcgccaatcacgttagaatcatcaccgccctgaatttgaaccggacgaacgttaacgatagtaccgtacgttacattctgaacttgtttagcctcggatgcggtataaacatcacccgaaaggctatcattgttaacacaccccgctagggataaccccatcagtgaaacggccagtacacgtttaatcatttacccatctcctgttcttcacgaaacgctatttcagcatccctatagctaaattatatggcatttatgcagttaaggtcatatcttctgccgaaagaatgtgaaaatcataatcagaagttaattaaccaatcttaaacgaagtcggaagcaagaaaagataggtcattgatatccgtggacgacacggcaaaaaatgtgacgtgggcatagcattacaaaatacgttatgccgagtgttaaggcttaacccagcttaaaaggaagaggtatgaaatcgggccgttttattggcgttatgtccggaaccagccttgatggcgtggatgttgtactggcggcaattgatgaaaccatggttgcgcaacaggcaagtctcacctggcccattcccgttcatctgaaaaaaggcattctcgatatttgccagggacagccgcttacgctctcgcaactcggccagcttgatacccagttaggccggctttttgcacaggcggttaatgcgctgttagcgcaacaacgtttgcagccgcgggatatcgtcgccattggttgtcatgggcaaacggtctggcatgaaccgaccggcgaggccccgcatacgctgcaaattggcgataataatcacatcgtcgcccatacggggattacagtggtcggcgattttcggcggcgggatattgcgctgggcggacaaggcgcgccgttggtgcctgctttccatcacgcgctgttgggacatccgacggaaaaacgtatggtcctgaatatcggcggcatcgccaatttatctctgcttttccccggacaggcggtgcgcgggtacgacacggggccgggtaatatgttgatggatgcgtggatttggcgacaatgcgcgcagccctacgacaaagacgcggcatgggcgaaagaaggtcaggttattcttccattgctgcaaaagatgttgcgcgatccgtactttgctgcgtcggcgcccaaaagtacaggacgcgaatatttcaactatggctggttagagcgccatcttgcggctttccctggcgcagacgcgcgcgatgtacaggccacgctggcggagctgacggcggtctccatcgcccaacaggtgctgctcaacggcggctgcgagcggctgatggtctgtggcggcggtggccggaatccgttagtgatggcccgtctggcggcgctgttgccaggtatcgaggtttcgaccaccgataaggcggggatcagcggcgatgatatggaagcgctggcctttgcctggcttgcctggcgaacgctcgcgggcctgccgggaaatttaccttccgtgacgggggctacagaagccagtgttttaggcgctatttacccggctaacccaataactcagagttaactgaatttttcccggaccctatatcggtaaactagcaaggtcaggaaggggcgtttgcccttccagaagcaggagagctttcgggatatgcctatgaaaaagatcgcaataatgtgtttacctgtgctgctgaccggctgtagcgtttatcaacaatttgttgaacgtatgcaaacggatacgctggaataccagtgtgatgagaagccgcttaccgttaaagtcaataacccgcgtgaagaggtcagttttgtttatgacaataagctgctgaccctgaagcaaggaatctcggcctcgggcgcgcgttataccgacgggatttatgttttctggtcgcaaggcgagagcgccacggtctataaacgagacagaattgtgcttaataactgtcagttacaaaatccgaagcgttgagattttcagtatgggggcgcacaatagcgccacccactgattatttctgatcaacgccatgtctgataacgaccaattgcagcagatcgcgcatctgcgccgtgaatacacgaaaggcggcttgcgtcgccgcgatttacccgctgaaccgttaaccttatttgagcgctggcttgggcaagcgtgcgacgccagactggccgatccaacggcaatggtcgtggcgaccgtagatgacaagggtcaaccgtaccagcgtattgtgttgctcaagcattatgatgaaaaaggcctggtcttttataccaacctgggaagccgcaaggcgcatcagattgagcacaatccgcgtatcagcctgttatttccctggcatatgcttgaacgccaggtgatggtgacaggcaaagccgagcgtctctccactcttgaggtggtgaggtatttccacagccgtccgcgcgacagccagatcggcgcatgggtctctaaacaatccagccgcatttccgcgcgcggtatcctcgaaagcaaattcctggagctcaagcagaagtttcaacagggcgaagtgccgttacccagcttttggggtggttttcgcgtgagtatcgaacagatggagttctggcagggcggcgaacatcgtctgcacgatcgctttttataccaacgcgacgacggcgcgtggaaaatcgaccgtcttgcgccctaaagatgcaaaaatcttgttttaagcactggtgcggatgaatccgccgttttatgctatgtctctttcgcgtctggcgaaaagtcgtgtaccggcaaaggtgcagtcgttttatacatggagattttgatggcaagcagtaacttgattaaacaattgcaagagcgggggctggtagcccaggtgacggacgaagacgcgttggcagagcgactggcgcaaggcccgatcgcgctctattgcggcttcgatcctaccgctgacagcttgcatttggggcatctggttccattgttatgcctgaaacgcttccagcaggcagggcacaaacctgttgcgctggtaggcggcgcgaccggtctgattggcgacccgagcttcaaagccgccgagcgtaaactgaacactgaagagaccgttcaggagtgggtggcgaaaattcgtaaacaggttgccccattcctggactttgattgcggcgaaaactccgccatcgcggccaataactatgactggttcggcagcatgaatgtgctgactttcctgcgcgatatcggtaaacatttttccgttaatcagatgatcaacaaagaagcggtgaagcagcgtctgaaccgtgacgatcagggtatctctttcacggagttctcttataacctgctacaggggtacgacttcgcttgcctgaataaactgcacggcgttgccttacagattggcggttctgaccagtgggggaacatcacttccggtatcgacctgacccgtcgtctgcaccagaatcaggtatttggtttgaccgttccactcatcaccaaagctgacggcacgaaattcggtaaaaccgaaggcggcgctgtctggctggatccgaagaaaaccagtccgtacaaattctaccagttctggattaacaccgcagatgccgatgtttatcgcttcctgaaattcttcacttttatggacattgaagagatcaatgccctggaagaagaagataaaaacagcggtaaagcgccgcgcgcgcagtatgtgctggccgagcaggtgacgcgcctcgttcatggtgaagagggactggtcgcggcgaaacggatcaccgaatgcctgttcagcggttcactgagcgcgctgagcgaagctgactttgagcagttggcgcaggacggcgtaccgatggttgaaatggaaaaaggcgccgacctgatgcaggcgctggtagacgccgaactccagccgtcacgtggtcaggcgcgtaagactatcgcctccaacgctgtcactatcaatggtgaaaaacaatccgatcctgaatacatctttaacgatgaggaccgtctgtttggccgctataccttattacgtcgcggcaaaaagaactattgtctgatttgctggaaataaggcattaagtaacagggagtgagaaatcactcccttatttttgatgttcaggtaaaaaaatgaagaatatcctcgctatccagtcccatgttgttttcggacatgcgggcaacagcgccgccgaatttcccatgcgccgtcttggcgcgaatgtttggccgctgaataccgttcagttttctaaccacacgcaatatggtaaatggaccggctgtgtcatgccgcccagccatctgactgagattgtccaggggattgcggacattggccagttagcgcactgcgacgccgtacttagcggttacctgggatctgccgagcagggagaacacattctcggtattgtgcgccaggttaaagcagcaaatccgcaggcaaaatatttctgcgatcccgtgatggggcatccggaaaagggttgtatcgtggcgcctggcgtcgcagagttccatgtgcgttatgcgctacccgccagcgatattatcgcgcctaacctgattgaactggaaattctcagcaaacatagcgtgaataatgtggatgacgccgtgcaggcggcgcgtgaactgattgctcaggggccagaaattgtactggtaaaacatctcgcccgcgccggttacagttcagaacgctttgaaatgctgctggtgacagcgcaggaagcctggcatattagccgtccgctggtggatttcggttcacgtcagccggttggcgttggcgatgtcaccagtggtttattgctggtcaaacttttgcagggcgcgacgttgcagcaggcgctggagcacgttacggcggcagtctatgagattatgatcgccaccaaaacgatgcaggagtacgaactgcaggtcgtggcggcccaggacaggatcgctaaccctgaacattacttcagcgcaacgcggctgtaattattgctgctaaaaagaggccggatggcggtacagcgagctatccggcaacatgacattaattcagtccttccgctttaagcgctgccgcaacggtcggtctttttgcgacacgctgcatataactttcaatatgcgttaacccgtccatattcagttttacgccataggcccaacgcaatacggtaaacagataagcgtctgcaatggtaaaacgctggccgcaaatccactggtcgtctgaaagcgactcatccacatactgcaatttcttttccagaccggcgcgaacggcgggtttgagtgtttccggcgtgtcagggcggaacagcggggtaaagcctttatgcagttccgttgcaatatagttgagccattccagcgtatgatagcgagcaagactacttaccggcgccagaagctggcggtcgggaacgctgtcggcgaggtactgcataatggcgacgccttcagtcaacagtgtgccgtcatccagcagcagagccggaacctgtcctttagggttgactgccaggtaatcatcaccgttttccaggcgtttttttgcgagatcgacgccatcaagcgtaaagtctttgccaatttcgcgcagggtaatatgggaagcaagagagcaggcacccggtttgtagaacagtttcatcggtaactcctttttgctgaggtttaaagtatggtagtgcggggacgagcaaaaaaaaagccgctaacgcacagttagcggcctgaatgttgtttcccggaaaattaaactgtagcggctttagagcctttttcagcggtatcatcgtcctgggtcatacggttcagcttaggcgctgtcagcagcatcaggacggcgataacggcggttgctatgccaatctgcataaatacgcgaccatagacttccagggacatcagtgggtcagtcacgtcgctcggcacagccatcaggttggcgacataaccgccgatgatgttagcgcctgccgttgtcaggaaccagctacccatgatgaaacccatcagacgctgcggaaccaactgtgcgaccattgccagtcccagaccggagatcatcagctcaccgatactttgcaggccgtagcttgcgatcagccagtttacggatacgatgccggcatcgttcgcaaatttggcacccagcggcagaatcaggaacgcgccggaacacagcaccataccaatggcgaatttcatcggcatcggcagcgtatcgcccatcctgttatagatagcggccagaatcgggctgccgataatgatccagaatgggttcagcgcctgatactgttccggttcgaacgcgataccgagaatagagtgctcgacgttacgaatggcaaagaagttcagcgacgtcggcatctggctgtacagtacgaagaagataatcgcctgcagcatcaaaataaaggcgacgatcattttacggcgagccgcgccgtgcatggaaaacgcttctttaccgaagataatgacgatgccaagagcgattacgcccagcaccatacgtgcgatatcctggttgtgcagcagccaggtggcgaccgcaatcagaacgacaatacccacgatggtcagcagcagattacggaagttgatcggttcaaagtcgggtttggaaccgtagcttttcacccagcgctggcagaaagcaaagttaacgacggttatcagcataccgacgacgctaagcgcaaacgcggtgctccagccataacgcgccgccagccacggcgtcgccagcatagagaagaaggagccgatgttgacggacatataatacatcgtaaatgcgccgtcgagacgcggatcgtccttcgcgtaacaggtagacagcagggaagacgggttagctttaaacagaccgttacccacagcgatagccgccatgcccatatagacgatgccagcgtcatgaccagaccatgcgaccagcgcataaccgatagccagcaccacggcacccagcataataacgcgtttggtgcccagaattttatcacctaaccaaccgccaatggcgaccaggccgtacaccagtgcactgaaggaagagaaaagggtgatggaatccgcttctgacatacccagttgttttaccaggtagacggccataatgccttgcaggccgtaataaccaaaacgctcccataactctatcgagaagatgagatagaacgccttcggttgtttgaaagcgttcaaactgacgctttcagttggttttttgtttgcagtagacacttttacctcttttttacgccccgtattaacagggattgtctggcgcgtgatgagtcagactcatccgtccgattgttatattggaggggaaacggcaggtaatgttcactatctttcctctccagacaagagctttgtaataatctgttacatataactcttctggttgaatcgtccgatgtcagaaatgttatccagcgttaaatttcttcatttgaagaatggcagatttttacactgcaaaaaggccattagtttgggtgaaaggcgatatcttctgctatttaaggtgaaaagcagtgatataggccattatctgaaaaaatggcagagtaatgttttgtagtgaaaacggggcgtcagtctatccggttgtaaatgtaaccttagatgtcattaaatttcacatgaagttatcaaagtgatcctgatcacggatagatagaattttttgcgattaaaaaaatgattaacctgacgtggagtgaaaacgaaagcacattacatcagaaaaaggacagagactggaatgattgatggctaaaatagatccaggccgaaggtgggagcgcgctggcgtgacggacgcactccgaccatatcaaatatcgactttttctttgtattcgcaaagatcttcaatgaggcaggagccgcagcggggttttcgggcgatacaggtatagcggccatgcaaaattaaccagtgatggcagtccactttgaactcattcggcaccactttcagcaacttctcttctacctgctcgacatttttacccggcgcgaactgcgttcggttgcatacacgaaatatatgcgtatcaacggcgatggtcggccagccgaaggcggtatttagcaccacgtaagcggttttacgccccacgccgggaagcgcttccagcgccgcccgatcctccggcacttcgccattatgcttgtccagtaaaatatggcaggtcttaatcacgttttccgctttactgttaaataagccgatagttttgatataggatttcacgccctctacgcccagctccagcatcgcggctggcgtattggcgaccgggtaaagtttggcggtagccttgttcacgctgacgtcggttgcctgcgcggaaagcaacacggcaatcagcaactcaaacggcgacgtgaaattgagttccgttgtggggtgcggattgttgtcgcgcaggcgcgtcagaatttccagcctttttgctttgttcatcagactttccctgtttcacctgccggaacagcggaaggcgcggtttcggcgcggcgtttcttcattttttcatcaataagatattttaccgccagcatgagccccaggccgataaacgcgcctggcggcagcatcgccagcaggaaaggcgagtcggtgtgaaatatctcgacccgtaatacttttgcccagcctcccagcaggctatccgcgccatcgaaaagcgtaccattcccgaggatctcgcgcagcgaacccagcacgaacatcgcgcctgtcgcgcccatgccgatggaaaaaccgtccaacgcggaaagccacggtccttttttcgcggcaaacgcttcggcgcgaccaacaacaatgcagttcgttacaatcagaggaataaaaatccctaaagactgatacaaaccgaacgcatacgcattgatcagcatctgtactgcgcttaccaccgaggcaatgatcatgacgtaaatcgggatacggatttctgccggcgtccagcgacgtagtgcggacaccgtaaggttggtcagcgttaataccagcgttgtggccagacccagccccagagcgttggttgccgtagacgtcaccgccagtagagggcacaggccaagtagctgcaccagagcagagttatttttccataacccctgaacaacaatgtcttttatttcgctcatggctattctccacaggcggttaaatgggggagctgagcgggcagtgattcggcgtacagccccgcgcgtttaaccgcattcactacggcgcgcggcgttattgtcgccccggtaaattgatcaaaatcaccgccatcttttttcaccgcccagtgcgtatcattttcaccactgatggttttaccgctaaagtgggtaatccagtcagacaaacggcgctcaattttatcacctaaccctggcgtctcatgatgttccgtcacacgcgtccccaggacggtaccgttgaaatctgcgccaacaataagctggatagcgccggaatagccatctggcgcggtagcctcaatgatggccgctacgggtttatcatccttgcgagcgataaaaacacggtgtgtgcctttgccgagggcgggcgcatcgaccagataacaactctcttgcagattattattgtaacgatctggcggcaatacctgatcgaacagggcatgttgttgttgcagcgcttgttcgtggatggttgattttgtcatctgattaatcaccgcggtcaatcccgtagagcctgcggcaaaaagcgccagcgtaataccgtgtttacgaatcgttttcagcatggtttatcctttgcgatgtccatagacgcgggggcgcgtgtagtagtcgatcagaggaaccgtgatattcgccaacaggacagcaaaagcaacgccgtccggatagccgccgaagctacgaatcagccacactaataccccagccagcgcgccgaaaattaaacgtccacggttggtcgtggaggcggtaaccggatccgttaagataaaaaatgcacccagcatggtggcgcctgacagcagatgaagctgcggcgaggccagcgtagcgggcgagaaaagccagcctaacgcggcgcatagcgccagcgtcagcagaaaactgaccgggatatgccagcggatggctttttgccacagcaggaatacgccgccgacaagccaggcgaggttaacccactgccagcccacgccagccagcgcgccgctgtatatcgggtactgcatgatttgctcaacggagtgcccggcgcgcaaggacgttttaaacgtatccagcggcgtcgcctggctgataccgtcaataccgatacgtagcagcgtcatatcgccgccgctggcggtatgcccggtaaaaatcatccgcaacgtgtccagcatatcgggcgttgttgcggctatttcataaggcggcaaccagcttgtcatttgcaccggaaaggaaattaatagcaccacgtaaccgatcatggccggattaaaggggttttgtcccagcccgccatataactgtttagcgataataatggcgaatccggttcccagcacgaccatccaccagggcgcaagcggagggatgctgaccgccagcaaaagccccgtcaataacgcggaataatcctgcaggtgactggcgaccgattgtttgcgcagcctgaggacaatggcttctgcgacgagcgccgtgatagcagccagaacgatctggaaaagcgttccccaaccaaaaaaccacgtctgcgcggcaatccccggcagagcggcgattaataccagcaacatgattcgcgatgtctggcgctggttatgggtataaggcgagcttgcgattctgaataccatttaatcctcgttaacaacctgctgctgtgctgctttttttgcctgaacgcgggcgatagccgcagcaaccgcggctttacgcgggtcggccggttcggcaggttcgcttccggcctgctgctcctgcttacgggctttggcgcgagcgatggccgcttccactgcggctttgcgcggatcgatcggttcggcaggttcgcttccggctgctgctcctgcttacgggctttggcgcgggcgatggctgcctccaccgcggctttacgcggatcgaccggttcggctggttcgcttccggcctgctgctcctgcttacgggctttggcgcgggcgatggctgcctccactgcagctttactcgggtcgtcgccgggtatcgcgctgtcagccatcggatgagcggcttgtttagcgcgcgcttgcgctttacgcgcttcacgggccgcgatgacggcgctattgtctggctgactacccgcctgaataaccaccggttgcgtggcctgcgcctgtttctcttttacccgcgccagcgcagcggcaatggcatcctgatcttttgccgctggttgtaccgctgcgctcttgtgacgtgcaaggcgggcggctttttcgcgctccagtcttgcctgacgagcctcaaaacgcgctttggcttcggcggcgcgtttttcttcaagcctgatcgcattaatctccgctttttcctgacggaaatattggacgagcggaatattactcgggcagacccaggcgcaggcgccgcattctatacaatcagcaatatggtgagcggtagccttgtcatgctgctgccctttgctgaaccaataaagctgctgcggtaaaaggtcggcagggcaagcgtcagcgcaagcgctgcaacgaatacagcttttctcttcctgaggcgctcccatttcagtcacggatggcgccagcaggcagttggtgatttttacgaccggtacgtcaagccagggaagggtgaatcccatcaacgggccgcccatgatgaccatctggtcagcagaagggcagaacccggcatcgttaagcaaatgacgaacgggagtgccgagccgcgcccagacgttacccgggcggcttaccgcttcacccgttaaggtgacgacgcgttctgtgatcggttcgccgtcaatcacggcgcgtttaacggcatacgccgtaccgacgttttgcatcagcacgccaatatcagaggagcgcccgccgtggggaacctgttttcccgtcagtattcgggtgagctgttttgcgccgccggaagggtatttggttgggatcacacgtaacgaaatatcgtgggcgtcagccagtacggcgcgcagcatggaaatagcctgcggtttgttatcttcaatgccgattaatacctcacgcggttgcagaatatgcgccaggatgcgaataccttccacaatctgcgcggcgcagtcctgcatcaaacgatcgtccgccgtaatgtaaggttcgcactctgcggcattgataataagcgtggtgattttatcgccgccgccctgcaatttaacgccggtgggaaaccccgcgccgccaagcccggcaacgccatactgatgaatgcgttcaatgagcgcttcacggctgtgggcgcggtaatcagaccagccctcgcgttcaatccagcggtcctcgccgtcggcatcaatgattacgcttaactccgccagcgccgaaggatgcgccgtcgagtggggggcaatagcgataaccgtcccggaggtgggcgcgtgtaccggcagcattctcccacgtccacgggtaagcgcctggccgcgtagcacgcgatcgccgacgctaacgcacagctcgccctcagcgccaatgtgctgttttaaagggataacaaagcgcggcgctaaaggcacctggcgcagcggcgtgccgtttgactgggtcttcatttcgggcggatgaataccaccgtcgaaatcccagattttatcttttctgaaagcggaaaatagtttaagcatgttgttccacgggaatgatgcgaacgggaatggtgttcaaatcccatttccaactgtcgggcgtctcattcaccggacgtaattcgatgcagtgcgtcggacacggatcgacgcacagattacagccagtacagagatcgctcatgaccgtgtgcatggcgcgcgttgcgccaacaatggcgtcaaccgggcaggcctgaatgcattttgtgcagccaatgcagttattttcatcaataactgccagcatacgtactggcgcagcctgctgttcttcaccatcgcatggttgcggctctacgtttagcaactctgcaattttcagcatgacggcttcgccgccgggcgcgcaacgattgattttctcgccctggagacccacggcttcggcgtaggggcggcagccgggatagccgcactgaccacactggctctgcggcaaaatcgcatcgattttttcaacaaccggatcatcttcaaccgcgaatcggcgggaggcataacccagaatggcgccgaacaccagacccagaagggtcagggcgccaacggcaatccagatagtattcattacaacttcaccaaaccactaaaacccataaaggccaaagacattaatcctgcggtaatcaatgctatcgcgttaccacgaaaaggggcgggcacatccgccacggcaaggcgttcgcggatagcggcaaacagaaccatcactaatgaaaaaccgacggcggcggaaaatccgtacagcgccgactgaagaaagtgatgaccgagattaatattcagtaacgctacgcccagaaccgcacagttagtggtaatcagtggtaagaagatgcctaacaagcggtataacgccgggctggttttccgcacaaccatttcggtaaattgcacgaccacagcaatgacgaggataaaggctagcgtccgcagataaatcagatccagcggaataagtatccaggtgtcgataagccaggcgcatatcgacgccagcgtcatgacaaaggtcgtcgcgaggcccatccccatggcggtttccagttttttggatacgcccataaagggacaaaggcccaggaatttgaccagtacaaagttattgaccagtacagttccgacaaagagcagcaggtaatcagtcatgtttcggcctgaaataaaaaagccgcctattatctgtcaaactaccacaggcgacaacaggttaactgtagggttattacggattaacaaacgttgttttaacgcgcgctgaacgtttgagataaggcacaatgagcgccgttgccaacagtgggaagagtaactgacgcacggcaaaggcatctgagacgggcgaaaaggcaaatgctttaaccgccagtaacaccgacaccagcagccagataatgtaatgcttcggcacgcagcgtctgcgcttgaagaatgcgatcgtcaaccacagggtatagtaccacatggcgatagcggtaataaatgaaatgccccatagcagtaaattaccggtttcctgtccgctaagcgtcttgaacgtttgcggtgtggcaagcgccataacgtagagtaataacgccagcgaggcgctcaacaacgcgactaacagccaggctaacgggccaagaagccagcctccaattcgttgtggcggtgttgtagtcatatcttctccggggttacgcgcattaacggtcatgccgctcattttggggcaaatattataaggtttttgatgttaaacgctactttctttattgcacatagcgccagacggattgcggaacctgacctacatcaaacaggcgtcctccggaaaccagttcggcacggcggtgatctgcagcgcgatacatattaacaatgtccatgtcatcagtaagggtatagttaaggtggtcgaacagtttttccagactttcgagcgaactaattttgcggaattttaatagataatcctgaacagtcatataaagttgatccatattaaatataatgccaacggagtagtcactgataaaaaataaacaaaaccgcaccagtgagaggtcaggggtgcaggtaaaaagggaatattcttaccggtaaagagtcaggcgccacatggcgcctggggcgaaaggttaacgcgctttcctacaacaggcaataaacgtcagaccagataggacatatttcgttttttttgccggtttttgacttttctttgcaccccccggggcgccgcttaccgtaccacgcgaaaatgcctttacattatctgacgcttacttcttctggacggaagccgtgggctctggtggttggtaattgtcaatatggttggcaatacctaaaagaatgactgagataacgagaactatccacccagttaattcaataagacgattcattattgacgacatttgctttgatttatccataaacacagggggtaaatgttactttcctggcgaacggtcggcaagagggagggaaacgttttcagcctctgttctgtaacaagttaatcatttgatgctacgttgatggtcaggacgctattgcggctaatcgcacgatggtgtggaatagcgatatctaaaaccggaggcagtgagatgaatgataaaatccgcgttgggttaatcggttatggctacgccagtaaaacctttcatgcgcccttaattatgggaacgccagggctagagcttgcggcggtatccagcagcgatgaaacaaaagtgaaagcagattggccggcggtttccgtggtctctgagccccgacatttatttaacgatccgcatatcgaccttatcgtgatcccgacgcccaacgatacccatttcccgctggcgaaagctgcgctggaagccggtaagcatgtggtggttgataaaccctttaccgtgacactgtcacaggcgcgagaattggatgcgcttgcgcggagcactggtcgggtactttccgtcttccacaaccgacgctgggacagcgattttttgacgctgaaggccttgctggcggatggcgtgctcggcgaggtgtccttgtttgaatcccactttgatcgcttccgtccccaggtgcgcgaccgctggcgcgagcaaggcgggccgggaagtggtatctggtacgatctggcgccgcacttgttggatcaggccattcaactttttggcctgccggtcagcatgacggtggatttagcgcaactgcgtccgggcgcgcaatctacagattatttccacgcgattttatcctacccccagcgccgcgtgattttgcacggtacgatgctggccgcggcggaatccgcgcgatacatcgttcatggttcgcgcggtagctatgtaaaatatggcctcgatccccaggaagaacggttaaaaaacggcgagcgtttaccgcaggaagactggggatacgacatgcgtgacggcgtattgaccctggttgagggagagacgcgcaaagaagaaaactggcttacgttgccgggtaactatccggcatattatgccgccatccgcgatgcgttaaacggtaacggtgaaaatcccgtgccagcaagccaggcgattcaaattatggagttgattgaactgggcatggaatcggcaaaacatcgcgcgacgctgtgtcttgcctgagatgtcgcatttctccgcctgggatagcattaaaccgcaggcggagagagggcgttagcatcaataaagcaatcttacgcctcggccactttttcgcgcagcgcacgtttttcgctatcgctcagaaaggcgatttccagaccgttaatctgcgcctggcgaatctgttcgcggctcaatcctgccgctggcgcggcgacgtgatattcatggataatatctacgccctgaacagccggatcgtccgtattaagactggcgagaacgccatgctcaaggaaggttttgagtggatgatccgccagcgatgcgacggtactggtctgaatattcgaggtcagacaggattcaataccgatacgctgctgtgcaagaaaatccattaacgcgcgatcttcgacagcttttacgccatgtccgatacgttcggcccccagttcgcgaatcgcctgccagatactttccggccctgcggcttcgccagcgtgaacggtgatatgccagcccgcatcgcgcgcccgattaaagtgcgacaaaaacagactgccgggaaagcccagctcatcaccggctaaatccagcgcggtgatgttctctctgtgcgccagcagcgcatcaagctcctgtaaacatgccgcctcgccgaaggtacggctcataatgccaatgagtcgtgcctcgacgccaaacgtgttacagccgtcgcgtacgccgtcgataacggcttcaaccacgcctgcgattggtaactgatgcgccatcgccatatagccgggcgaaaagcgaagctcgacgtaatgcaggccgttacgtgccgcatcttcaatattttcaaaggccacacggcggcaggcgtcaagcgatgccaggacttttaccccccaatcgagtttagtgagaaagcttactaaatcgggttcggttgaggtgacctggacatacggaatcagcgtttccagcgtttgggcgggaagggcgatgttgaactgccgaccaagatccagaattgtttgggcgcgaatgttgccatcaaggtggcggtggatgtcagtcaaaggaagcgtaatatcaatcatgggcgcactcaatttttaataaaagtgcgcaccattatactacagattgataatgctctggaaattttgcaaaaacggagtcattacgttgcaacttcgcgagagcgcgggagaaattttgtatcattctctttaacgcgcccccggtcagctcacgggggcgtctctgttatcgcctctcaggataaagggtcaaccccccgcctgtagacagtatcagcgaacggtgcggtggcaaaatccatatccgagatcgtaaaggggagcagatcggcttcgccaaaacgatcggcgacataatcccactacgtacaccatgtcccgcgtcggtcaacttcctgtgaaaaatcgaacatatcccttccttatgcctgaacggtattcatcaggccaaccatttcatcttttaccgactgaacctgcgggccgataattacctgcaaattatgctgattgagctgtacgatgcctgtcgcgtgattgtccttcaatgcctggacatcgacaaacgacatatctttcactgacaggcgtaggggggatgcagttgtccagactcacgatgttttccgtgccgcctaatgctcacgacgagcaccatgtgcggagtcaaacgatagccgctcgcctggtaacgcaaaagtagaggctgcgcgtcgttcggcgcagaccgggtgcagcgtcgcgacacccggcaaggcgattattgttgaggcagcgccggaacgtccggaacggaaagcgccggcatcccaaacaggccgacaaagtcttccaacggcattttttgtccgttgagcgtgatctggccattggcgtactgcaaactggaggcgatagtattatccttcagcgttgtcagtcggaacatctgacccattgcggacagcccctgcacctgctgttttgccagtttttccgcatcatcctgctgatagccttccagttttgctatctgcgtcataaactcgaccgccatgtccattggaattgccagtttcgcatccagcgatttcacggagcggtcgacttcctgcgccagcgtttgtggttgtgccgttgtggttgccggatctttgaggaacagcgacagattcagcgtggtttcccctttggcgtttttccagctaagcggcgccagagtcagtaccggatcgccttttaacagcacggggagagcgctaaagaacgcttcggtgactttttgctgataaagctcaggattctgcgccacgtccggctgattcagcagcgcctgcgtttgcgcatgatattgctgactaaactggtgccaggcttcgccgtcgatttggccgactttcagcgttaatttaccgctgcccaaatcctgattctgcactttcaggctgttaagcgagtaatccaactggctgttaatggtttttccgtcgttgacgagatcggacttgccggtaatttccatcccttccagcaccgccatctctttaccctcaatggcgatggacagtttatccagcgttaacttttggtcgcccacacgttcgccaaagcttgccagtttactggtaccgtcggttttcaaattattaaaggtgagttggaccttctgattatattcgttaacggcatcgaccaggccgctctgcgcttcgcctgacagcgaaaccacattaccgtctttatcggcgttaagctggaactcgccgccgctaaaggcgaccttttcaccggcattctcgtagtttaacggcttgagagagatatcggagcgggtatcgccgccataaccaatgcgggtattgataacaaagggcgcgtcgcctttcgcaatatcaaagaggggttttgccgcatcgttattcaccagagtggtttttaccgacgccatagaagggatcagattgagcgttttgagctgggcgagcgggaaggggccatgtgaaacggactcgtccagcacaatgctttgcccgggcttcaaccaggtattgtctgcgccggcaaccggtttgacaaccagttgcagatggctactgaacacgccgcgctggtagttttgataacttaattcgacaccggcctccggcgcagtacgcttgagctgttcattggcctgagtcaccatttctgcaagatggttctccagctttttccccgtataccaggcgccgcctgtccagacgatgccaagtgcaattactacacctgcagctaccagtgtttttttcatatcaattgtccataaaaatgaaaccaggcggattaaaccgcctggaggagttttacgtctgttataagcttagcaagagttgttaaaaaattcagtacgttgctacagcttgttataaacacgcgctaaacggcccgtgccgctggcgttaaccggagactcatccgcgccgataaaggcagattcacccggcttcagtaccagacgctgttcatctttacgtaacaccgcctcaccctcaacgcagaacagaatcgcggcgctgtgttggccgatgctcgtctcctgaagcgccaggtcgtgcagtgaaaaagcaaaatcgtcaaccggaattgggaagtccagctccgcgccgcttttcaccggggcagtcagcaactcgccggcaggcttaggttcgaacttcacgttcgcgaccagctcagggatgtcgatatattttggcgtaaggccagcgcgcagaacgttatcggagttcgccatgacttccagcgcaacgccctgcagataagcatgaggcgtttcagcaaacaggaacatcgcctcgccgggattcagtttgaccacattcagcaacaaaggagagaaaagcccgctgtcgtcaggataatactctgaaatcacgcggatcgtttgccacggttcgccttgctggctgttaagcgccgctttgagtacggctaacgcgcgggatttttcttcgccttgcatattcaacaggctggcgaaaagctggctcagacgttcagcattcggcacctgcaaaaagtgggcgatagcggaatgcgcgccggcgacaggttgcagtaaagagacaatgtcagaaaattcgcggaacgcgttcatcgccaggaaaggcgtcagggcaaaaaccagctctggtttatggttaggatctttatagttccgctctgcggcatccatggggatacccgccgcattttctttcgcgaaaccgatttcggagttgcgtttattcgggtgcacctgaatagagagcggttgtgcggcgcacagtactttaaacagaaacggcagttcgccgaaacggttggctaccgcttcgcccagcatggcggttttattcttttcgatggcgtcacgcagggagacggtttcgccgttggcggtggtgattcgcgagctgcttttgggatgcgcgcccatccagagttcagccattggctgctgctgcggattggcgatgccataaagttccgttaacgcagttttacttccccaggcatagttttgcactgagttaatgagtttttgcattatcaagccctgtttcaatgtggagatcaatgggaggtattaaaccaagaaacccgcatgaagtaacctccgggcgtaaaaagtcgtacttgtctcagtttttgttaaaaaattgtgtaggatagtgttactcgctttgagtcgggcaatggaacacctgcccagagaataaccataccgagcggtaagtgagagcacaatgtcaaacaaacccttcttttatcaagacccttttcccctcaaaaaggacgataccgagtactacttgttgaccagcgaacatgtttccgtcgccgaattcgaaggacaagagatcctgaaagtcgcgccggaagcgctaacgctgttggcgcgtcaggccttccacgatgcgtcttttatgctacgtcccgcgcatcagcagcaggtggcggatattctgcgcgatccgcaggccagtgaaaacgacaaatatgtcgcgctgcaattcctgcgaaactccgatatcgcggccaagggcgtgttgcccacctgccaggataccggtacggccattattgtcggcaaaaaaggtcaacgcgtctggactggtggaggtgatgaagcggcgctggctcgcggcgtatataacacctatatcgaagataacctgcgctattcacagaacgcggcgctggatatgtacaaagaggtcaataccggtactaacctgccggcgcagatcgatctctacagcgtcgatggcgatgaatataaattcctctgtatcgctaaaggcggcggatcggcgaataaaacctacctctatcaggagacaaaagcgcttctgacgccgggtaagcttaaaaattatctcgtcgataagatgcgtacgctgggcaccgccgcttgtccgccgtatcacatcgcgtttgtcattggcggcacctcggcggaagcgaacctgaagaccgttaagctggcctcggcaaaatactatgatgcgctaccaaccgaaggcaatgaacacgggcaggccttccgcgatattgagctggaaaaagaattgttgcttgaggcgcaaaatcttggcttaggcgcgcagttcggcggcaagtatttcgctcacgatattcgtgtcatccgattgccgcgccacggggcatcgtgtccggtaggtatgggcgtgtcctgctccgcggatcgaaacattaaagcgaagatcaaccgggacgggatctggatcgagaagctggagcgcaatcccggtaaatatattccagaggcgctgcgccaggcgggagagggtgaggcggtgcgcgttgatcttaaccgtcccatgagcgagatactgcaacaactgtcgcagtatccggtatcaacgcgcctgtcgctgaacggcacgattattgtgggccgcgacatcgcgcacgctaaactgaaagaacggatggacagaggcgaaggtttgccgcagtacatcaaagatcatcctatctattatgcggggccggcaaaaacgccggaagggtatgcctccgggtcgcttgggccgactaccgcaggacgaatggactcttatgttgatcagctccagtcgcagggcggcagtatgatcatgctggcgaaaggcaaccgcagccagcaggtgaccgatgcctgtaagaaacatggcggcttctacctgggcagtatcggcggcccggcagccgttctggcgcagggtagtatcaagcgcctggagtgcgtggaatatcctgaactgggtatggaggctatctggaaaattgaagtggaggattttccggccttcattctggtggatgataaaggcaacgatttcttccagcagattcagtcatcgcagtgcgcgcgctgcgttaagtaatgtcgccgccctgcggggcggtaacatgattcgctattttgccggagaacggcgcaagcgccttatccggtctacaccgttgtgttgttatcgttaatactcataagaccgcaaacatgtgagcaatgtcgacacatgatctcatcaacttgagtaaggagcaggtaatggtaacggtacgccgcgagaaagattcaatgggcgcgattgaagtcccggcagataaactgtggggggcgcagactcaacgttcgctggagcattttcggatttccacggagaaaatgcccgtctcgctcattcacgctctggcgttgaccaagcgcgccgctgcgaaggtcaaccaggacttagggttgttggcggcggaaaaagccagcgcgattatccaggcggctgatgaagtgctggcgggaaaacatgctgatgagtttccgctggcgatttggcagaccgggtccggtacgcaaagcaacatgaatatgaatgaagtgttagcgaaccgcgccagtgaaattttgggcggcgttcgcggtatggaacgcaaggtgcatcccaatgatgacgtcaataagagtcaaagctcaaacgatgttttcccaaccgccatgcacgtggcggcgttactggcgttacgcgaacaccttatcccgcaattatccgcattaacggatacgcttcgcgataaatcccacgctttcgccgatattgtcaaaattggccgtactcacctgcaggacgcgacgccgctcaccttaggccaggagatttccggttgggtagccatgctggaacataacctcagacacattgagcacagtttaccgcacgtcgcggaactggcgctcggcggaaccgcagtagggacagggcttaatacccatccggaatatgcccggcgcgtggccgaggaactggcgacgattaccgcggcgccgtttgttaccgcccccaataaattcgaagcgctggcgacctgtgacgcgttggtacaggcgcatggcgcattaaaaggactggcggcctcgctgatgaaaatcgccaacgatgttcgctggctggcgtccggcccgcgttgcggcattggcgagattgctatcccggagaatgagccaggcagttccattatgcctggtaaagtgaacccgacccagtgtgaagcggtaacgatgctatgttgccaggtgatgggtaacgatgtggccatcaatatggggggcgcatcgggcaactttgagctcaacgtctatcgtccgatggttattcataattttctgcaaacggtgcgcctgctggccgatggcatggagagttttaataaacactgtgcgtcaggaatcgagccaaaccgcgagcgtattacgcagttgctgaatgagtcgctgatgctggtcactgcgctgaatacgcacatcggttacgataaagcggcggagattgcgaagaaggcgcataaagaagggctgacgctcaaagcctcagccgtggcattaggataccttagcgacgaggagttcgacgcctgggtacgtccggagttgatggttggcagtatgacgccgggacgttaatccgccacatacaggtgcagtcgcggaataatcagtcgcagcggctgcgcctgtggtttaaaacggtgctgaatattgtcggcgtcatagttttccagcccgccaatatccggcacgccagcgccgttgtccgtgttgattaatgcgataatcggcgtggggcaggcgtgttgcacctgtttctgctggcctttataccagatgcgggagatcggctgtactttaaccggacgcttaatcttgagtcgggcctgctgcggtaaggcagcgatatcctgatattcccgttccagcttgaattgccattgttcgcgcgtccacggcgggacgctgcgcggcgacgcgaggctttttttcaactggctcagaacctcatcccggcttaaatttttaataatatgtttatttgcccagccgaaacgtatggtggcggggttattgataagcgtcagcgtgcggtaagcgttcagcgtaattaagccgggtagatgccgatgcacccactcaaaacgtgccgctgagggaagaccggactctaccgtaaccatctgctcgaaggtggttttcaactggttaatgcgctgtatctgattttccagatctaactgtgtcgcattatccacttgatagcataagacgccaggcaggcggacggcggctttactgctgcggttttcggactgctgttgaataaacaaatggcgatagtgacgtagcgccagcgcttcggcctctttccccagatgttgcgttacctcgatagtatccagcggcgcatgttccgcctctttggtcacctgcggcagtgaaaagacacgggcgataagtagcgaatgctgctgtagattatccgtcagcgccgccaggtgttgttctatctggcgaaaagtgccattcaggcgttcaacgagatcgtagcgggacatggtatcactcactttagttacaacatactatatgtatagcacagttcccgccgctcaaccagcgtgcaaaatgcgtcaggcagcggtcatgtcgggcatcgcgtgccagaccggccagcgaaagctaaattttgcgccgcccagttcgctctcgtcacagacgacgctaccgcccatcgccagggcgatagagtgtacgatggcgagtccaagcccgcagccgcctgtcgcccggtctctactggggtcgagtctgacaaaaggttcaaatacgcgctctcgcgcatccgcttcaatgccggggccatcatcttcgactatcaacgttgcctgactgccgtcgagtaacagactgacctgaacggtggtatgactgtagcgcaacgcattattcagcaggttatccagcactcgcgacattaaccgcatatcaagcgcgccataatcgccgattacacatgtgacaaggtttacggcacgttccggggtcacgctctgcacatcctgcaaatgcgcgagcaaccaggcggggaggtcgggttcggtcaacatcagttcattttgtggtcggtcaaggcgcgcataggtgagcagttcttcaatcagcgcttccagttgaccaatatcgcgattgagcgcctgtgattccggcggtgtcagattttcactcatttcaagccgatagcgtaaacgtaccagcggcgtgcgaagctcatgggcgataccgtcaatcagctgttttttactggcgatcagggcattaatgttatccgccatctggttgaacgcgacgcccagacgttcgaaactggagccattatcgaagtgcaggcgttcagtcaaatgaccctcgccaaagcgctgcgcggcggattcgagcctgagcatttcttgccagtgcgggcgcatccagataaacacaggaaaggcgagagaaaaggcaatgagcgccattaaggcgatatccagcagtcgcatttgatgcaggaaatagagatagggaaccgggccaaccgccaggacgtaatggctgcgcgggatacgctgaataaaggtgtattgatcgtcaagcgcgacaatatcgccttcacgcagtcgctgcgtggtggcggcatcaagcttatagtgatttaacggttcaacgcgtaaatcgaaagagaggttcaggtccatctcttttaacgttttcccccattcacgcggcggaatttcccgcagttcgctgcgcatcagatagagcgaacttttcatcagatcgtcgagcgattgcctgcccgcgcgttcggcggtgaatttgtacaccagtccgaccaataaggtcatgaccagaaaacagacgaacagcaaaaggtaaaactgcacaaacagctttttcatcaacgcccaccggatctcaatacattagctctatcgcgcgctgacgaaaaagatttcccgtcagcgccgctggtgggttataaaagcaggctttgcgtcaactgacaacctcattgtccggcgttaaggtccggactttcgtgaacaatgcgtccatcgacaagcgtcaaaacagcgcgaatggtatcaattctgtcttccggcatcgtcataaatggctgattgagtaccgccagatcggcctgttttccgacgcgaagctggccccggtgttgttcggcaaaggcgagccaggcggcatgacgtgtatataacgctagcgcttccagacgcgtgagccgctcgctggcgggtttacgcacggaaccgcctgacgctataccggtgatatgatattcgatagcgtgccagacaccggcaatgccaatacgcgtcgaatcggtaccgccagctacgacaagccctttatccagcgccagtcgaaccggcggcgaattgtccgtcgcgccgggtggattggcgtcacggatggcaagcccctcaaagtaaggccccatttgcacagtgtatgccagacccagcttacgcattcgctcaagcgtctgtggcgaaccggtattcagatgcgcaatagaccaacggagagggcgcagatcgtactgctgagctacctgctcaaaaatcgtcaatatcgcgtcggcgctatcatcggtataggcgtggatctcaagcggtattccccgttttgccgcaaatgtcgcgacctggcgaagcgcggttttgtcctgctctgaggaagaaaaccctggggccatccgcacgccgtcattcattccggccaccaggctttcccccaggccaagaaaagccagttgcccgtcatcggcacgcgccgggcgaaaggccatcaggttgctgaaccactgcgcttcatgacctttcgcttctggctgtaccggaatgcgataccccacgcgcagcggtaaatccccctggtttcgcattgcaaataaaggctcataagcggcggcaggcccggcagaggggtcaatgatgccggtcacgccgcgagcgttcatatcagcgaaaaattgccgcagaccaccctcacgatcggcgttacgacttatgctggcaaaaagctggttaaacgcggcgatgtcaccaaataatttccccgtggcgctaccttttgcgtcgcgctctacgcggattcccgctaaatcaggaggaggggtgttgttaaggccaagtacgtctataccgcgctgattcactaacgcatagtcgtaaagatactgaatataagccggatgatcgggaagggcgtgactcagttcggctaccgtcggcgcccggttttctgcaaattgcgccggtatccacgatcccactacggctacccattgatcgtggggacgacggttagcgtcggcgcgtaatttatccagcgcgtctttaagcgaagggctgtcgtaccagtaggtttcgaatgtccaggtttgtccgccgcgaatggcgtggatgtgagtatcggtcaggccgggtatcacggttttaccctgtaaatcgatggtacgggtatggtcgccgcgccattcatttgtcgccgtatcatcgccaatcgccacaatccgcgagccggaaatcgccagcgcgctggcctgcggctgggcatcattcagagtgatgatattaccgttatgcaaaataatatccgctgccgggcgggcggcggtggctgcgcctgtggccgtgagcagaaagagaagcgcggttctggaaagcagagacgggacgagactgatcattagcatgttccttttgtcgggcgataagcaaaccatagagagcgaacaagaattgttcaatctgtgcccagggaactgtgcgttctgtttttagaacggtggtgatgaaaaaagaaaagcccgccgaaacggcgggcttgagaagaattaatgaataattagaactggtaaaccatacccagcgcgacgatatcatcagtgctgataccggcatctttatagaactggtcgtcatcatccagcaggttgattttataatcaacataggtggagaagtttttgttgaaatagtaggtagcacctacatcagcatatttaaccaggtctttatcatcgccattaacgttgttataggtcaaatctttacctttagacatcaggaaagaaaccgccgggcgcagaccgaaatcaaattgatattgggctgtaacttcgaagttttgcgttttgtttgctacgcatgagcgacaatcgtcattgccgtaaggcgtcatattacgggtttctgaatacattgtggccagatagatattattagcatcatatttagcgccaacagtccatgcatccgctttatcaccgccagcggtagagtaattaacctgaccattagtacgatcggaagtggtatatgccgcgccgaaacttacgcccatacccagatcataagttgatgagataccgaagccgtcaccgttagcgttcttcacgttacgatcgccgccgttattagtgccttcctgctcatgagaaacctggttttcattggcaccctgatattgcaacgcgaagttcagaccgtctaccagaccgaagaaatcagtgttacggtaggtggccacgccgttagcacgaccggtcatgaagttgtcagcgtaagtgtaggagtcgccgccgaactcaggcagcatatcggtccagccttctacgtcgtacaggacgccgtagttacgaccatagtcgaatgagccgtagtcgccgaatttcaggccggcgaatgccagacgagtccaggaattagcaccttcgccttcggtagtgttagcctgaacgttatattcccactggccgtaaccggtcagttggtcgttaatctgtgtttcgcctttaaagccgacacgcatataggtctgatcgccatctttagaagagtcatcagagaaatagtgcaggccgtctactttcccgtaaaggtccagtttgttgccgtctttgttataaatttcagcggcgtgtgctgcgccagcagccagcagagccgggatgacaagtgccaatacttttcttttcatttttttatccttaaaaacttaacttatttgcaaaagattgaacttctacagattcgttgaatcaaaggcatcctaatctgaataatattatttcagcaaatgctaacttttcttatatgttattaattaatacaaaagttactatcggaaacgcatatatttatggtgaatatatttgttattatgtattcatgtatgtgatttgttttatttcacaatttgcgaaaaaagatggcaatatagcggcgggcagacattctgttatcaattttgtgaactggcttcgagtttttttaatttaactttcttgagcgaaaaagacgtaatcatgaaccacaacgcagagaaaacggtaataaaggggccgtttcgactaataaaaatagcattcatgtatgcaatgtctgttttttgaacagtggcggtgatgagcatcgccactatgacttgataaaggcaggtaaaatctgtcggctaacttatcccgtcgtttcgtcccaggcatgaggggcaaaaagatagcctttattgcgaatggtctttatacgatagggctcagcagcgctatccagcagtttcttacgcaggcgggaaatcgctacatccacgctgcgatccagaccatcataattgacgccgcgcagcgtttttagcaacgcgtcgcgatccataatttgtccggcgtgtgtcgccagttcccagagcaattcaaaatcggcggtggagagcgatatgaaatcgccattgagctggaccgcccggttaaggggatcgatggttaacgcgccaaaacgcagcgctttatgcggcgtaagcgcgctctcctgaagactttttgcctgttgcgtttgttcgctttgccgcaggtgtaagcgcagacgcgccagcaaaacggccggaggcgtggttttgaggatgtagtcgcaggcgcccatctccagcgccagaatatgattcatatcactgtccagcgaggtgagcaggacaatcgggccttgccagcggtggcgtaaatcgcgacatatcgtcatgccatctttacctggaagcataatatccagtaaaaccagatcgggctgagtggtgaggataagatcctccgcccggtcaccacgcggctcaacaatgacatcaatatcatgtttcgccagataagcggcaatgagagaacccacttcagcgtcgtcttcaacaaatacaatgcggttcatattataaatggagaatagaaaacgccaacatacaccgcctctgttttcccttccataaatattttctaaacgagagcggttccgttatgctacacgctgttgttattagcgtgttaaggcaaggtaatgggactcgtgattaaagctgccctgggggcgctggtcgtcgtattgattggtctgctgtcaaaaacgaaaaattattatatcgccggattaattcctctgtttccaacgtttgcgcttatcgcgcactatatcgtggccagcgagcggggcatcgacgcgatgcgtaccaccatcgtctttagtatgtggtcgatcattccttatttcatttatcttgcaacgctatggtatttcagcggcgtgatgcgcctgcccgtcgcgcttggcggtgcggtggtctgctgggggctaagcgcgtggctgctgattttttgctggattaaatggcattaatattggcaaagaccgtggtttccccatcgtaatacagacggatattacgatggggaggttgtcaacccaccagcatccacgtagccggaaccgccgcgaccagcaataaaccaatcagcacgacttcctgacgatttaacacgttgtcatgcttgtgcgtccgacgcgcatacaggaaaaccagtaatccaggcgcgtacagtacgagggacagcagcaggtgcatgggacccgacgcgtataacaaccataagccataaatacaggctccgataccgaccgcccgatggaggggacgtgttgcaatcttcagcagaaatgcgccgaccagaaagtagggcaccagaatcatttctgacgcaatcgtcaatagcgtgttgtagtccgaaccggtcagccagatcagcaccagacagatttgcacacagatattggtgagccataacgatgcagaaggcgcgccttgcgcattttgtcgcgcgaagatgcccgggaaggatttataggctgccgccagaaatggcacctccgccgccataatagtccagcttagataagccccgcagacagacacaatcagtcccgctgcaataataatttctccccacggccccatcatttttaccattagtccggccatcgacgggttacgcatctccgccagttccggacgcgcaagaacgccaagagaaagcagcgtgaccaggagatatattcccagcgccgcgaggaccgccagtagcgtggcgcggcctacatcgcgtttatttttcgctcgggccgagacgacgacggcgccttcaacgccaataaacacccacagcgtaataagcatggtgttcttgacctgttcccatacgggaataccgagttcaacaccagtgaagtccagtgtgaaggtatccagtttgaacatcatgatagccagcacaataaacgcgccgagcggcaacagtttcgccagagtcgcgaccagattgatgctggctgccgtttgtacgccgcgcaggatgaggaaatggacaatccagagcaagactgaagcgccgacaatagcctgccaggtattaccgtcaccaaacagacgcaaggcaggcgtatcggtaaagaaactcagcgctgaaaagacgataaccaaataggatacgttggcgatgaccgcgcacagccaatagccccaggcagaacaaaagccaatcagttcgccgaagccttcgcgggcgtaagtaaagataccgccgtcaagctcggagcgaatgcgcgtaaggattaacatggcgaatgccagtaagagtatccccacgccggtaatggcccagccaattaacaacgcagccggactggcaacggcggccatattctggggcagactgaaaacacctgcgccaagcattgagcttaaaaccagcgcggtcagcgcgctcagtcccagttttttttccattggtatccagctataaaaatgaaattggaagaataattattatggcaaaacgcataaaaatggtgaaagccactaaggcgcgggattttacggagagaagggaccgcatgcaacggcctggataagatttatcgccaaaaaagcgaaaagtgagattcatcgcgatatttgacggaactggcatcccgcgagaaagtgccggatggcggcttatcaggcctgccgttgaacgatcgtgtaggcctgataaggcaggtatgccgccatccggcgagaaagcctgatggcgacgcgcgccttatttatagaggtcggcgctgatggtgatgttattaccgcgctcctgccactgacgcgtaatatgataatacttagcgcctttcttcgccgcgcgtttggcgacctgataggagatttctgtcatattgccgtagttgccggtgaacttaacgctgtcgaaaggcaccatcatcgcagccgtcgctttattcagctcctcaacttttgtgccatccggaagtgtgacagtgtaacgtccgcctttggaggattgcgtttcgaagaaacggcctacttcggcgctcggcgaggctgacgtggcgacgcctggaatttcgactttcttcgcagcttcgccgccctgagccagcgcggcgcggccagcttcagagtctgccggaatagcgtccgggctctggacgatgcgttttttcgcatcttgtttatagataaatgcagtgatgcgctggtttccgccctgattcgcatctatctgacgaacaatatagaaagcgtatgcgcctttttgtttcgccgctttcgtaatggcatcgttaacttccggctggctacggtagaagccctgaacggtgacggtgtcatacggttctaattgtacggcctggtctttcggtaattccacgatgccattaatgacacgatttttgggcgcgtcggctttcggcgcgtcggctttatacacgtccgccacaacacgccagttaccactgttgccgaactccgaggtgtcgacaacatagaaggaggctgcgccttctttatctgcgcggcgggacacggcggagaccgcatcgccaatagcattaaaacgaccggtaataacgatgcggtcataaggttttagtgcagccgcttgctccggcgtcagttctgttgctgcatggacagaaaaagcagccgcagaaagcagagccgacgccaggagagtgttcttaagcttcataaaaataatccttcgccttgcgcaaaccaggtactggtattgttattgactagaaacgtggctgattattgcatttaaaccatatggatgtctgcgggatttttcacgcatcgtgtcatgtatcctatctttgatgataacatttgccgatatgtcgaaaaaaacggcgtccgggcggctaagctaatgaagcgcataaatttaataagttaatttaatgttaatttcttgatcgcgccaggggtttaatgatgttttgctgtcaaatttgagcgaattatcagccctcgcaggccattttcaaggcattatggctgcttagcggctgaatcgttcatgttttgcaaatttgataaaaaattctgttttttggcgctagatcacaggcgttattttcagtaggttatagagagtttgtaacggttttattctgctggggtaacatttacctcaaacgcgggcaggcgtacgcttctcgcgcttactgacaaaccatcatcaaaaatatcgatggaagggaacatttatgcgaattggcataccaaaagagcggttacccaatgaaacccgtgtcgctgcgacgccgaaaacggtagagcagctactgaagctggggtttagcgtcgctatcgaaagcggggcgggtcaactggcaagttttgacgacaaagcgtttgcgcaggctggcgcggatattgtagacggcaatgctatctggcagtcggaaattattctcaaggttaatgcgcctgaagaagaggaaatcgctttactgaaccccggaactacgctggtcagttttatctggcctgcgcaaaatcctgggttaatggagaaacttgccgaacgtaaggttacggtgatggcgatggactccgtgccgcgtatttcccgcgcgcagtcgctcgacgcgttaagctcaatggcgaatatcgcgggttatcgcgccattgtagaggccgcgcatgaatttgggcgcttctttaccgggcaaatcaccgccgccgggaaagtgccgccggcgaaggtgatggtgattggcgcgggcgtagccggtcttgcggctatcggcgcggcaaacagcctgggggcgattgtccgcgcgtttgacactcgtcctgaagtcaaagagcaggtccagagtatgggggctgagttcctcgaactggattttaaagaggaagccggtagcggcgatggttacgccaaagtgatgtccgaggcgtttatcaaagcggaaatggcgctctttgccgcccaggccaaagaggtcgatatcatcgttaccaccgcgttgattccgggcaaaccagcgccgaagctgattacccgcgatatggtcgattctatgaaggccggcagcgtgattgtcgacctggccgcgcagaatggcggtaactgcgaatataccgtcgccaatcaggttgtgacgacggacaatggcgtgaaagtaattggctacaccgatctaccggggcgtttgccgacgcagtcatcccaactttatggcaccaacctggttaatctgctgaagctgctgtgcaaagagaaagacggcaatattgacgtggattttgacgatgtcgtgatccgtggcgtgacggtgattcgcgacggcgacattacctggcctgcgccgccaatccaggtttccgcgcagccacaggccgcgcctaaagcagcacctgcgccaaaagagccggaaaagcccacttcaccctggcggaagtatgcgttaatggcgctggcgatcattctttttggctggctggccgatgtcgcgccaaaagagttcctcggccattttaccgtgtttgcgctcgcctgcgtggttggttattacgtggtgtggaacgtgtctcatgcgcttcatacgccattaatgtcggtgaccaacgcaatttcagggattattgttgtcggggcattattgcaaattggtcagggcggctgggtcagcttcctgagctttatcgcggtgcttatcgccagcattaatattttcggtggcttcaccgtgactcagcgtatgctgaaaatgttccggaaaaactaaggggtaacacatgtctggaggattagttacagctgcatacattgttgccgcgatcctgtttattttcagtcttgccgggctttcaaagcatgaaacgtcccgccaggggaataacttcggtattgccgggatggcgatcgcgttgctggcgaccattttcgggccggataccggcaacgtggcatggattctggtcgccatgattattggcggcgcgattggcatccgcatggcgaaaaaagttgagatgaccgagatgccggagctggtcgcgattctgcacagtttcgtgggcctggcggcggtactggttggctttaacagctatctgtaccatgacgccagtctggcgccggtgctggtgaatattcatctgaccgaagtcttcctcggtatctttattggcgcagtcactttcactggatcgatcgtagcgtttggtaaactgcgcggcaaaatctcttctaagccgttgatgttgcctaaccgtcacaaaatgaacctggcggcgctggttgtttctttcctgttgctgctggtttttgttcgtaccgaaagcgtgggtctacaggttctggcgctactgctgatgaccattatcgcgctggcgtttggttggcatctggtcgcttctatcggcggggcggacatgccggtggttgtttcaatgctgaactcctattccggttgggctgccgcggcggctggcttcatgttgagcaacgatttgctgattgtgaccggcgcgctggtcggttcgtcaggcgcgatcctgtcttacattatgtgtaaagcgatgaaccgctctttcatcagcgttattgctggtgggttcggtactgacggctcctcaacgggcgacgatcaggaagctggcgaacatcgcgaaatcacggcggaagagaccgctgagatgctgaaaaactcccactccgtcattattacgccggggtatgggatggcggtagcgcaggcgcagtatccggtggcggaaatcaccgaaaaactgcgcgcgcgcgggatcaacgtgcgtttcggcattcatccggtggcgggtcgcctgccggggcatatgaacgtgctgttggcggaggcgaaagtgccttatgacatcgtgctggagatggacgagatcaatgatgatttcgccgataccgataccgtgctggtgattggcgcgaacgatacggtgaacccggcggcgcaagacgatccccgcagcccgatcgccggtatgccggttctcgaagtgtggaaagcacagaatgtcgtggtctttaagcgttcaatgaataccggttatgctggtgtgcagaacccgctgttctttaaagagaatacgcaaatgctgtttggcgatgccaaagccagcgtggatgcgattctgaaagcgctttaatcttttaaacgtgcggcggcctcttcggaggccgtttttatacacttcatcctttacgctgcctctttgttggctgcactcagaaaccccggtcacatcgttatctatgctcccggggatttcttcccttgccgccgcgatgcatcttgaatgattttgtgtatgtattgcattttatcttttgtttaaatcgctaagcagaacggcgatactctgcccgccggtggtctgttcgagggcgattttgacaatgatggttaacggaacggagagcaacatgcccaccggacctaataaccagccccagaaaattaacgacaaaaataccactaaggttgaaagacctaaaccacgtcccatgattcgtggctcaaggatattgccgaagaccagattaatcagcagatagcctgccagcaccagcagcgcatcataaaacccgttaaataccagcacctgaataatgggtggcagggcagcgagcaccgatccaatattaggaatatagttcagcgcgaaggccagtagaccccagacaaaggcgaagcggacatccagcgcggccagcattccccatgcgaccagccccgtcacgatactgatcgctgtttttaacaccagataatgggaaacgctatcaagcgcgcgttgaattgccgccataccttctaccgggcggctcatcatctgctgcagtttttcaggcagttgtggaacctccaacagcataaataccacggtcaatagcaataaaaagatggatgacatggcattggacagttgggtgagcaggttcgttaccagagtcatggcggcgtttggatcgatatatttcgccagctcatcaaccgacacgccaatgccagctcgctgcaaccacggttcaatacgttgcaacggtatcaccaatgaggagcgatattgcggtagggtacgagccagttcatttaatgatgtccccaaataggccagtagtagtaccattaacataacaataatcacaatgagcaatgatacggcgataacgcgcggaattcggcatcgggtcatccgttgcacaacgggattgagaacgactgcaataaataacgccaaaataaagggaacaatgatatctgcggcgaagcggataccgctcagaataactaccagcattcccagcataatgacgatttttagaccattgagcgtgatgatcggttttgccatatcagtccctgttttctgatgccgacacgaataataatgtgatgtcggtcgacctgttctggttaaaatcaaacacttcaggtaaagaagtgaaaatattttgagttaattcctggcttatgatacaaatcaggcgtgttcaactaccgaggacaattatcatccgcgatgacgagaagcaacactgcggataattgtaatattatggacaatatgttcagcgcttttttctccacgcaaacgcatcttcactctacctcctttttcctgcttatcggcgagcagcactggcgtaacgcactttagtctctcacttctgcctgagctggcgcaatgcgctgtgctaactgattttattttttagtttgctgcgtgcagcagactcgaaagagtatattctcatgcaggagaagtgtcatgttttactggattttattagctctggctatcgcgactgaaattaccggcacgctctcaatgaaatgggctagtgtgggtaatggcaatgcgggttttattttaatgctggtgatgatcacgctgtcatatatatttctttcttttgcggtaaaaaagattgccctgggtgtagcgtatgccttatgggaagggatcggcattttatttattaccatttttagcgtgctgctatttgatgaagcattatcaaccatgaagattgccggcttgctgacgctggtcgccggcatcgtattgatcaaatcagggacgcgtaaacccggcaaaccggtgaaggaggcgactcgtgcaacaatttgaatggatacacggcgcctggcttgggctggcaataatgctggaaatcgcggctaacgttctgttgaaattttcggacggctttcgccgtaaatgctatggcatcttatcgcttgccgctgttctggccgccttcagcgcgctttcccaggcggtaaaagggatagacctgtcggtggcgtatgcgctatggggcggttttggtattgccgctacgctggcggcgggctgggtgctcttcggccagcgcttaaatcccaaaggctgggttggcgtgatattgctgctcgccggaatggtcatgatcaaatttgcctgagacgatcgctgccggttggttcaggcagcgattcccgcattaatcctgcgccagagctttcagcttatcgcgaaagccggtgacggatatagcgcggttatcggcgcgccagcgatctttagccgcaggggcggagctttgtacgccaataagctgccatccgctatccgtgtgcaataagagcggcgagccgctgtcgccaggtaacgtgtcgcactggtgtgagagtacggcattctgcgcccagccggtcacgacgcaatcctgatgggaatagagcgcattcagatgatcttccggataaccggactgcgtgacttttcggtctgcggctttcaacgccgcagtgagcgccgctttatcgccggtaaataaaggcactggcgtgataccggaaggtgggtagcgcaatattaccagaccaaaatcccagcttgccgcggcaggcggcacaatccagccatcgccatccgctttcaggcgtcggcccagcgacggttcaacgcggccttcaatgccgtggatttcatagcgccatactccttttcgcgccacaaaacgcagcgcaaccgccttgtctggttttcctttcggtggcgttagcaggcagtgacctgctgtcagggcgatatgcggggagataagcgttgccgtacacaaattaccgctggcggtctctagttgcccgatggcatcccacggcgattgggtaggatcggcgacgggcacccgatcatcatggttaaaaaaaagcgttttaacgtcgctggcatccgtggcgtctgtttcagcccccccggctttcgccataaccggtaaaaaacacactatgcccagtaatacagcaatggttttatgcatatcacactctggtgggtaattatgattattaacaacaaaccctcagtactactatagacgtgacggtaagaaagtgggagtaaaatcagataactacactcaggaaagatagaaatgcgtggcaataacggcgcataaaataagcacgataagaatgagctcaaagcggtagcgagacacttttttgccctcccggaaggcggcgctaaaccagaacaatttagcgccgtaaaaacgggcgcgggggcgcgccgcagcatgttacgacttacgcagccggttgagtagttggttttgacgtggttttggctggcgctttaccaccttttttctggtgctttttagccgcctgcgctttttgctcaacggttttcttatgctgttttttgtggtgctgggtggtctgggttgttttggcaggcgctgcggttttcgcaggcgttgcagtctcagccgcgaatgctgcggaagagagacccattgcagcggcaacaaccagagctaatacttttttcattttgataccctcgatttggttttcattcaaccccactgcggggccggtgaaatgactatatcgctgttatcaaaaggcttccgtgagtgattggtttcggcatgtaacgttatgtacaatcccccggtaacgcgatgtcagcccccaccataataggtagctttacgttaccggccgttatttttggtcgcagagtcggtaatatccgccatccagaataacaggcacaccgtatatgaatccgataatctgggtggtatttacgcttctggcgctggatgcaatcagagaagttatgggcgtatcaagcttgacaggtctgtggtgaacagtgagtcgtggcgtgaaaccagcccggcgatagcgcacgttgctatcgccggattatttcttttcaggcgtgaagacgatgatgtaaccgcgtcccgaccaggatggccagcaccagcattagcgcgataaaaccacctacgccgttccagccgtaactatgccagaatacgccgcctagcgtcccggcaatactggaccccagataatagctgaaaagataaagtgacgaggcctgtcccttcgcccggcgcgcacgcgggccaatccaactactggccacggagtgcgcggcgaaaaagccggcggaaaaaagcagcatcccggcaaaaatcagccaaagcgaggtaaaaagcgtcagtaaaagcccacccagcattactgcggtagagaacagcatcaccggcccccggccatagcgtgaggtcattgcgccagctttcggcgagctccatgtgccggtgagataggctacggataacagtccgaccacggcctggcttaattcccagggggagagcatcaggcgatagccaatgtagttaaacagggtgacgaacgcgcccatcagtaaaaagccttccgcaaacagcagaggtaaccctcgatcgcgccagtggagacgaaaattaataaatagcgttttaggccgtagcgacgtgggacggaaatgttgcgaggcgggtaaaatcttccagaacatcagcgcggacgccagcgcaaagcatccgatggccgccagcgcgatgcgccagttaaaaaagtcggtcatgacgccgcttaataaacgtccgctcattccgccgatggaattaccgctaatgtagagccccatagagaaagcgacaaagctgggatggatttcttcgctcaggtaggtcattcccaccgcggcgacgccgcttaacgacagaccgatcagcgcgcgcataatcagaataccatgccagctggtcatcatggttgataacaatgtgcagcaggaggctaataacaaggcggtgaccatcaccggtttacggcctatcgcatcagaaagcgggccggtaaaaagtaagccgatagccagcatggcggtagaaatagaaagtgaaacgctgctgctggcgggggagacgccaaactcctgggaaagtaccggtagtataggctgaacgcaataaaggagcgcaaaagtcgccaggcccgcggaaaaaagggccagcgtgacgcgcatgaaaggcgctgtaccgcgtttaataaattgaaccggctgagaatggcgttgttcatcgatatcgctcgccgtggcgtcatcgagaatagttgtacgactcacgttaaatccttgctttacatctccgtcaacaggagacgggtataaccgacatgtaaagcatagaaaaagcaaaatattctgtctaatatattaattgtctcaaataagacgttaaaaatatgaatatcgaattacgtcatttacgttactttgtggcggtagcagaagagctgcattttggtcgcgccgccgcgcgcctcaatatctcgcagccgccgctgagtcagcagatacaaattctggagcagcaggtcggcgcgcgattactggcgcggaccaaccgcagcgtagcgttaaccgccgccgggcgacagtttctggtcgatagccgacacatcctgagtctggtaaacgacgccgccgctcgcgccgagcggttgcatcagggcgaagcgggtgaaatccgtattggctttacgtcttcagcgccttttattcgggcggtatcgcataccttttcgctgttccgccagtcctatccgggagtgcatatgcaaacgcgtgaaatgaatacgcgtgagcaaatcgcgccgctcaacgaaggcgtactggatattggcttgctgcggaatacgccgctgcccgacacacttaatcgcgaggtgattttgcatgagccgcttatggccatgatcccgcgcgaacatcggctggcgcaaaagccggtcgtcagtctgacagaactggcggaagaacctttcgtctttttcgacccacatgtcgggacgggcctctacgacgatattctcggcctgatgcggcgctataacctgtcgccgaccatcacgcaggaggttggcgaggcaatgaccattatcggtctggtggcggcggggctgggcgtctcgattctgccggcatcctttaagcgtgtacagatgagcgagatgcgctgggttcccctggcagaagaggacgccgtatctgaaatgtggctggtatggccaaagcatcatgaacagagtcatgccgtacagcggttttgccaactgctattactggctgcccgacgggattaattacgcttaaaaagggtgaaaatgtgcagttaatcacacggctaagcaaaaagttgacggcgagtattgaagtgtttcaccatagcacacagattatttcggagcgcgaaaataaagggagtgagcggtggttgctgatagtcagcctgggcatatcgatcaaattaagcagaccaatgctggcgcagtgtatcgcctgattgatcagctcggaccggtatcgcgaattgacctgtctcgtctggcgcagttggcgcctgccagtattacgaaaattgttcgcgaaatgctggaagcgcatttggttcaggaacttgaaattaaagaggcgggcagtcgtggacgtcccgccgtcgggctgatggtggaaacggaagcctggcactatttatctattcgtattagccgtggcgaaattttccttgcactgcgcgatcttagcagcaaactggtggtagaagagtgtctgccgctgccgttaaccgaagccacgccgttgcttgagcgaattattacgcacgttgatcggttttttacccgccatcagcagaaactggagcgtctgacatccattgccattacgttaccgggcattatcgataccgaaaacggcgttgtgcaccggatgccgtattacgaagatgtcaaagagatgcctttgggagattcgctggagcggcacactggcgtaccggtttacattcagcatgatattagcgcctggacgatggcagaggcgctttttggcgcttcacgcggcgcgcgcgacgttatccaggtggtgattgatcataatgtgggggcgggcgttatcaccgacggtcatttgcttcatgcgggtagtagcagtctggtagagattgggcatacccaggtcgatccttatggtaagcgctgttattgcggtaatcatggctgtctggagaccatcgccagcgtcgatagcgtgctggaacttacgcagcttcggcttaatcagtcgatgagttcaatgttgcacggccagccgttaacggtagattcactgtgtcaggcggcgatgcagggagatctattagcaaaagatattattagcggcgttggcgcgcatgtcggacgcattctggctatcatggtgaatttatttaatccgcaaaaaattcttattggttcgccgctaagtaaagcggctgatatcctttttccggccattgctgacagtatccgtcaacaggcgctgcccgcctacagcaggaatacggttgtggaaagcacgcagtttaccaaccagggcacgatggccggggcggcgttggtaaaagacgcgatgtataacggctctttgttgattcgtctattacagggttaacattttttaactgttgtacaaaaatttgcgctaactcaagctgattgcccttgccatatcttagactttctccactgtattattttcctggcttatattttcgaagcataacggtggagttagtgatgctgaagcgtttctttattacaggtacagacacttctgttgggaagacggtggtttcccgcgcattactacaagcgttagcgtcgagtggtaagagcgttgcagggtataaacctgtcgctaaagggagcaaagagactgcagaagggatgcgcaacaaagatgcgctggtattgcaaagcgtctcttcgctggagttgccgtatgaggcgattaatccgatcgcgttaagcgaagaagaaagcagcgtcgcgcatagctgtcctataaattacaccttgctgtccaacggtctggcgagcctgagcgataaagtggaccacgtggttgtggagggtactggcggctggcgtagtttgatgaatgatttacgtccattgtctgaatgggtggtacaggaacagttaccggtattgatggtggtagggattcaggaggggtgcattaatcatgcgctactgactgcgcaagctgtcgctaatgatggactgcccttaattggctgggtggcgaatcgtatcaatcctggcctggcgcattatgctgaaattattgatgtgcttgggaaaaaactgccagcgccgctgattggcgagctaccgtacctgccgcgcgccgagcagcgtgagctggggcagtatattcgtttgtcaatgctcggcagcgtgctggcggtagatagaatcatggcgtaacgttcgcgagagcactgacgcgactacacaggcaatcagcagaccggggagtaactgatactcgccggtcatttcacaaatcatcagggtggacattatcggcgcatgggttgtcgccgccagtagcgtcgccatacccgccagccccaataaaatcgctatttcatccgagcctggcagccagaatccccatatccgacccagaaacattccaatggataatccgacaaataatgttggcgtaaagacgccgcccggcgcgccagacccgctgctggcgagcaccgccaggattttgcacacaaaaattccgccaatcagcgagaatagcggcggggagagcaaaaatgattgtacgacgctatagccgtttccccataccgtgggcgtgagtaacgacagtaatccgacaataagcccgcccaacgccagttgccagggcggggacagttttaaacgtaagaaactattatggctggccgtcatcagccacatcagcaatgggccgcacagaccggcgaccaggccggtactgactatcatgacgtactcccgcgcgtggagatcaacggtcagatgtacggtatagagtagtgaatcgctaccgtttaatacatgggtggttagcagggcgacgacggcggaaacgacaaccgggccgagggaagccagcattaaggtaccgaacaggatctccgcgataaacagactgcccgccagcggcgcatggtaagcgcccgccatgcccgcagcggcgccgctggcgatccataatttccattcctcacgcggcgtgaagcgtcgggcaaagctggacgccgccagcgcggcgaggaggatcattgcgccttcgcgaccaattgcgctgccgctgaccacgaccagcagcgaggccagcgatttcaccagactggcgccaacgtcaaattgcccgtcggtttgcaatgcttccatatagtcagtgggcgcatgggggcgctgttggttcattttttgccacccccacagcaacagaccagcggccaggccgccaagcgccggcgtaatcagccgtcgccagggcgaaagcccctcagccgcattcaccagactgccggtgtcattactcaggaaaatccactccagcaattgcatcgcatgacggaaggcggcgacagccagcgccgcgagaataccgatgagcgtagcgatcagcaggcgacgaaacatcgcgcgcagatccgggtaagcgtgtaaacgatgcatgagcgggtaaacagggagtttcaggatagcctattctgcggggaaatggcgtcagacgcaaaagcactatgtgcgatataatattgcgtacaataatgatactgccggatagcgagaggctatccggcggcaacgttagctgttttcgtgaatatttagcgcccgacgcgtgcggcctgagctgagatagtcggcgatgtaatcctgagagatttcaccgttatagcgtccgtcttcatcaacgatcggcatccagctggtattactttcgtacaatctggacagcacaatacgcaggttatcttccgctttgcccgtaatacggaaaggatgggtgatatcggcgcagattccgctggcgttccgcgcttcccggcgcttcacaaatcccagtggcttaccgtcgttgtcaatgacggtaatggcgcgaatatcgtgatcatccataatgccgaacgcctcgcttaacggcgtggaaggccgcgcggtaatggttggctgttggtcggtcacatcgcctgcggagaccagtagcaaacgctttaacgttctgtcctgaccgacaaacgacccgacaaactcgttagccggtttggccagcagttcatcaggactggcgcactgtacaattcgcccctgacggaacacggcgatacggtcgccgagctttagcgcttcgtcgatatcatggctgaccagcatcacggtcttttttagcttacgctgcatatccagaaactggttctggatcacttcgcggttaatggggtccaccgcgccgaagggctcatccatcagcagtaccggcggatcggcggccagagcgcggatcacgccaatacgctgttgctgtcccccggacatctcctttggatagcgatgcagaaattttctggcatccagcgccaccatgtccatcaactcttcggcgcgttgcttgcagcgtgctttgtcccaacccaacatgcgcggcacaacggtaatattttcttcaatcgtcatattaggaaacaggccgatttgttggataacatacccaatattgcggcgtagcgttaccgcatccatatcgttggtattctcgccgttgataagaatattaccgctgctgggcgcgatcagccggttgatcatctttaacgtggtggttttgccgcagccggagggaccgagtaagacgcacatttcgccttccggcacgttcaggttgacgttgtcgacggcttttagcggctgaccctttttctgtacaaattgtttggtgagattttccagttttatcattatcgtatccccttcggtgtcagtacgacttgcagacgatgcaacagccagtcaagtacaattgccagtagacagatcatcagcgcgccggcaattaacatgcgaatatcactgccgctaatgccgtttaacagtagcagccccagaccgccggcgccgatcaccgcggcaatcgccatcacgccgatattcatcactaccgcggtgcggatacccccgaaaataaccggtagggccattgggatttcgacccagcgcagccgttgccagaaagtcataccgatgccgcgtcccgcttcacgcagaccgggcggcaaactatcaagcgcagtatgggtattacggacaatcggcagtaaagagtagagaaaaacggccgtcacggcgggcagaacgccaataccatgtccgatcagcgaaaagagcgggatcattaatccaaacagcgcgatagacggaatggtaagaagtagcgtggcggcgcccaataccggcgttgccagccatttgtggcgtacaatcaaaacgcctaacggtacgccgatgataatcgccagaccgacggccagcgcgaccagccagagatgctgaaaggtaaggctggcgagatagcctgcgttatccagcatataatgtatcgtatccatagtcgctccttacagcagacctttgtcctgcaaaaattgatgggctacctgttgcggcgtgcgatgctcgatatcgacctgagcgtttagggtcgatatcacatcgttattgagcaggccggaaagggtgtttaaggcgtcatcaaggccaggattggcttccagcacctctttacgcaccacgggcgtgacagcgtaacttggaaagaagcctttatcatcttccagcactttcagatcaaaccctttcacccgtccgtcggtggtatagaccagcccggcgtcaaccagcccatcccgaacggcgttatagaccagccctgggtccatctgtcgtatttgcgggcgatcgagctgcatctggtaggcttgctgaaggggcttcattccgtcgctgcgcccggcaaattccagatcgaggccgagcatccagttgtggtcaggatcgttctgccggacctgttcgatttttgccaccatttgcgagatggtggtgatattttccgactcggcgcgtttgcgctgcatcgcgaacgcgtaagtattgttcatgtcagccggtttgagccataccaggcccagcttcgcatccaggcgttttaccgtgtcgtaggtttcctgtggactcatgcgcttatcgatacggttgaaaataatcagcgatgtaccggtgtattcccaggtaatatcaatttgtttattcaccatcgcattacgtgaaatcaccgcggcgatattggtttgcggctgaacctgaaagcctttcttctgcaaatactgaacggtcatagcggaaagaatatgctgttcggtaaagcttttggtggcgagaaccagcggcgcggcctgcgtctggctactgaacaacagcgttgcggcaagccatcccaacaggtgttttttgaatctcatttaacgctccttattgttatttatgcgttcagacggtatgagggctaaggcgtcgcccaaaccaggcaagcagagtgtcaagaatcagcgcgaataacgccgtggccgttgcgccgaggatcaacgtcggaaaatcgttgagataaattcccgggaaaatcagctcgccgtagctgctggcgccgatcagaaaggccagcggcgcggtgccgacattgatggcggtcgcgatgcgaataccggacagcatcactggccacgcattaggtagctctacctggcgaagccgctgccattttgtcatcccaatcccgttcgccgcttcaatcagtgaggcgggaacggaacagaggcccgcataggtattgcggacgataggcagaagggaggccagaaatagcgcgacaatggcgggcgtatcgccgatcccgataatcaccatcgctaaggccagaacggccagcggcggcaaggtattaccaacattaaagatttgcatgacatattcagcaaatccttttgccgcaggtcggctgagtaaaatcccgctcgggataccgaccagtaaagcaaaaaacatggacgtaaagaccagcatcaaatgccgttgtccgagatacagcagatcgacctgacgcgctttcagcgtctccagaccgattccccagataaacagcgccagtaacagcaaaatgacgatagtgaacccaagtacacgttttagggtgagggtgtgcattgcggtgtgtctccctgtttgcatgtgttatggcgacgttaagagtcgcgtgttgttatgccatgttccggcagggtgctttgagctatagcaacaggttgggaaggattccagcgaagcgtgatgtttaacactattaaacatctattaacaattatgctttgcccttatgcggcttagggtgaacattcacgataaagaattatcttaaaaatagaagcgcggtgtgacgttgtcactttttgtagataaaaataggccgcaatgagagaaaaggcaggtaaaatcctgccttttgtggggattaacggaataacggttttacagcgacgggaataatgagttgagcttgccattgcgccagcgtcagacgcgccagttgccccaacgcctgataaaacggatgcccggcatgatcgataaatacgtccagaaagcgggacgaccacggaaacagatgccaggccaggagttgttcgcattcatgatgacggtcgttctcggcaagccaggccgccagtagcaacagcgacccaaaatgatcttctggctcgttttgctgcatttcaaactgaattccgttttcgcgcatccactgacgtagcgccaatgtagaatcgccaaataatacgctctcacgatccagccagacggaaccccacggcggagacggcagagcgtaagggccgataaacagacgctgccaggcctgtggcaacgactcttcgctgtgggtcttaaacatagccgccacaggcgcaagcgcctcggcatcaagcggccactgcgcctgccagtcgtcgtttaatagcgcctggaccagaggagcggtttcgtggctttccggcgaataataaaacaacgcgccaagaacacgcgccgttactgcaaaatcatcacgttgtaaaaaagtggtcattcaaacaatcccgaaaggtgcgggtcgccccgcacgcataaattaacctgcgacggccatacctacggtcatatgcaggccataaaaaagtccgcggccaataatttcgcctgccagcaccagcacgacaccgagcagcaaaccaacggtatgcggttcgcggcgacggattagcggacatagccagcagcctaatccggcagcaagcaagacaatgcgccagacctgtagcataccgtaatccggtgcgagatggctggcctgttgcacggaactgtgaatggttgagagagacagtccttgtagtacgatgaccgtcacgcacaccaccaatgccaggccgctaatactggcaaacgtcacgctgcaaaatgggacgcgcgcgatgcgtagcagtaacgccgcaaacaccgggccgcacaggaatgccgtgaggaaaaaggccagcgtggtgtagccattataccaggttggcacggtatctatctgataaacgagcgtcattgcccagatgaatgcaacgccgagcgccatactgaccagcagccacactttacccagcgccgggggcattttaccgagtaccgccaccagccaccagatgccgcctacggcaaagaacaccgatcctgcggcgatttcattactcagtgcggaagcgcctacgcggttaagcgagttaaacgcgcgcatcggcgagccgagatgcataatcgacgcgaggaatcccagtcccatcaccagccacagaaaaaacatgctgcgcacgatgcgctgacgggcgatggtatcgtcttttgccgtcagccagcccagtccgctaacgattaacgcgccgaccacgcactgaccaaagaccgtgaagatcatcaacggccattcatgccatccacttcccatcttatacctccttcggattggccagataaccggtagtgtccccggtcgggcggctgttggcgttgggtttaatcacaatattcggcttcgtgaaatgcgcgcgcggcaacggcgcgacggcagccagctcaccgtgttttttacgcagttcgtctatcgggccaaagtccagtgcccgcagcgggcaggactccacgcaaatcggtttcttgccgtcagcgacacggtcataacagccgtcgcacttggtcatatgacctttggccgcgttgtactgcggcgcgccgtacgggcaggccatgtggcagtagcggcagccgatacagacctcttcgttcaccaccacaaaaccgtcatcgcgcttgtgcatcgcgccgctcgggcagactttggtacaggccgggtcttcgcagtggttgcatgaaatggagagataataggcaaagacgttctggtgccagacgccgttatcttcctgccagtcaccgcccgcatactcataaatgcggcggaagctgacgtcgggagtgagatctttgtagtccttgcaggccagttcgcaggttttgcaaccggtgcaacgactggaatcaataaaaaatccatactgggttgtcatcggttactccttacgccttttcaacctgaacaagattactgtgtgacggattacctttcgccagtggggaaggccggtgcgacgtcagaatgttaatggagccgccgcgatcgactttgtcgccaaacatgtcggcatttaaccaggcgccctggccgatagcggtgacgccgggcaatatgcgcggcgtgacttttgccggaatgagcatctctccattctggttaaagacccgcacggtgtcgccatgctgaatgccgcgcgcttgcgcatcaatcgggttgatccagatctcctgcggacacgcctgttgcaggatgtcgatattgccgtagctggagtgggtacgcgctttatagtggaagccggttagctgtagcgggtagcgctgacgaagcggatcgtcccaaccgtcaaagcctggcgtataggcgggtaaaggatggataatctcatctttcttcagctcccacgtgttggcgagggttgccagacgctcggaatagatttcgattttaccggacggcgttttcagtgggttggcggcagggtcttcgcggaaggcgcggaaagcgacgtagtgctcctccgggcattttttcttgaaaatccctgtctgtttcatctcttcgtaatccggcatttccgggttacgcgctttggtttttgcgtgcaggtatttgacccactcatgctgcgtgcggccttctgtgaaggtctggtatacgtccggaccaagccgtttagccacttcactgagcgtccagtaaatgggctttctttcaaatttcggcgaggtggcgggctgaccaagaatgacatagcccatattgcctgcggattcgtgggaaatcagatcttcctgctcggtcggcattaaatcaggcagcagaatgtcgcaatattttgccgacgcggtcataaagtgctcgatgccgacgatcatttcacatttactgtcgtcctgaagcacctcgtgggtgtgggcgatgtcgccatgctgattgatcagcgtattactggcgtagcaccacaaaaatttgatcggcacgtcgagcttgtcttttccccgcacgccgtcgcgtgtggcggtcatttccgcgccatgatcgatagcgtcggtccaggtaaagaccgaaatctgggtttttaccgggttctccagcatagaaaaccattcgacgcccagatcccaggtgccttcgcgcacgccggaattaccgccatttatgccgacgttaccggtgagtacagacagcatggcgattgcgcgtgcggtctgctccccgttagagtggcgttgcggtccccagccctggcaaatgtaagccggtttcgccgagccgatttcccgcgccagttgaatgattttttccgccggaatactggtaatctgcgcggcccattgcggcgttttagcaataccgtcgtcgccctgacccaaaatataggctttatagtgcgcgttacgcggggccgaggcgggcagagtggtttcgtcgtagccgatgcagtatttatccagaaacggtttatcaataagatcttcggtaatcagcacccaggcgattgccgccgccagcgcgccatcggtacctgggcgaatcggcagccactcgtcttctcggccagcggcagtgtcgttataacgcgggtcaatgacgatcatccgggcgttggagcgctcgcgcgcctgttcgacatagtatgtcacgccgccgccgctcatacgtgtttccgcgggattattgccaaacatcaccaccagttttgtattggcgatatcatccggactgttgccgtcattgccgccgaacatatagctcatggccgcgctgatttgggcggtgctgtagctaccgtaacggctgagatagccgccgcaggcgttcatcaggcgatacggtacgttagaattggtaatattgccgccgtccacgccggtaccgtaaagcacatgtaccgcttcgttgccgtagtccttgaggatacgtttcaggttatcgccgatggtatccaacgcttcatcccaactgatacgttcgaatttgccttctcctcgtttaccaacgcgtttcatcggatatttcaggcgatcgggatgattcatccggcgacgaatagaacggccgcgcaggcaggcgcgtacctgatggttgccatattcatcgttgcccgtggtatctgattcaacccaatatacggtgtcatcttttacgtgcaggcgcagcaggcagcggctgccgcagttaacggtacatgaactccagaccgctttttctgccacattgccggatgcgaggtctgctgcggcgtgtgcgatgcgggagaacggaagggtgaaagcgctactggcaagcgcaaggctaccgatagcggaggttttcaccaggcttcgtcggctgagactggccgccattaatgcctcagggttggtgattttcataacagctcactatgctcatccaaaaaagagttttaaatgtcgttgtgttcgcaaaacggggagctccgggcgcgtaaaaacgtcccggagcaggcggcttagattttttcgatttccaccagatttgtatgttgaggattcccttttgccaggggggaaggacgcagcgtcgtgagcgtattgatgcaggcgccgtggtcaattttatcgccagccatatccgcattatgccatgcgccctgacccatcgcgctgacgcccggcagaatacgcggcgtgactttggcgggtagacgcacctctccacgatcgttaaagacgcgaaccttatcgccattcgcgataccgcgtttttgcgcatcgagcggatttatccacacctcctggcgacaggcggcctgcagaacatcaatattgccgtagcttgaatgggtacgggatttatagtgaaagccaaacagctgtagcgggaaggtgctccgcttcggatcgtcccatccttcaaaagtaggggtataaatcggcagtgggcttatcacgtcgccttccgccagctcccaggtactggcgatgtgagcgagtttgcttgagtagatttcgattttaccggacggcgtttttaacggattggcctgcggatcttcacgaaattttttataggcgacaaagtggccgttgggatctttgcgtttatagatgcccatttttttcagatcgtcatacgcgggcaatgccggatctcttgcctgcattttggcgtacagatattgcagccattgcgcctgtgtacggccttcggtaaaccgctgatacacatcgtcgccgaggcgtctggcgatttcgctgagtacccagtagatgggcttgcgctcgaacttaggcgtcgtcgccggttggataaaaatcagatatcccatattgccggcgtaatcattggggatgatatcctcctgttcgacggtcatgagatccggcagtaaaatatcagcgtacttcgcggaagaggtcataaagttgtcgatgaccacaatcatttcgcatttcgcttcatcctgaagaatttcatgggttttattaatatccgaatgctgattaatcagggtgttgccagcgtagttccatagaaatttgatcggaacatccagcttatctttgccgcgtacgccgtcgcgcagggcggtcatttccgggccgcgcgcaatggcgtccgtccagctaaagcaggagatggcggttttaacgggattctccaggaccggcagacgttcaatggtaatggtgtaagtggattcgcgtgcgccgctattaccgccatgaatgccgacgttgccggtcagaatcggtaacatggcgatggcgcgagcggtttgttcgccgttcgcctgacgctgcgggccccaaccctgacagatgtaggccggcttgacgctgcctatctcgcgcgccagtttgataatccgatcggcggggatgccggtaatatgcgatgcccactgcggcgttttggcgataccgtcctcgccctgacccaaaatataagccttataatggccattggggggcgcgtcagccggaagggtcttttcatcgtagccgatgcaatagttatcgagaaaaggctggtcaacgagattttcgttaatcaatacccaggcaattcccgccaccagcgcggcatcggtgccggggcgaatcggtatccactcgtcttcacgtccggcagcggtatcggtatagcgcggatctattacgatcatgcgcgcatttgagtgttcacgcgcttgctccagaaaccaggtaatgccgccgccgctcatgcgtgtttcagccggattattgccgaacatgaccaccagtttactgttttcgatatcagatgtgctgttgccgtcgttggaaccataggtgtagggcatggcgcaagaaatttgcgcggtactgtatgagccgtattgattcaacgaaccgccgtagcagttcatcaaacgcttcaccggcgaggcggcaggcgacgagcgggttatgttgccgcctacgatgccggatgaatagtggatataaacggcttcattgccgtaggtctctacggtctttttcaggctggcgctaatggtgtccagtgcttcctgccagctaatgcgttcaaatttgccttcgccgcggcggccaacgcgtttcatgggatagttaaggcgatccggatggttaatacgccgacggattgaacggccccgcaggcaggcgcgaacctgatgattgccgtagacatcgtcgccagtgttatcagtttcaacccaccagacttcattatcttttacatgcagacgcagggcgcagcgactgccgcagttgaccgaacaggcgccccagacgattttatcttcttcgttgcgcatagcctgctgcaccgccgcggccgcggtacgcatcccaaacggtaaagatacgcctccggcagccagcgccagtgagccaagcgccgctgatttcactaacgtcctgcggctaacgcctgtttgttgcttttctccgggcatcactcactccattgtcgttattatttcgctatatattgataactataacgaaattattaacatgctaatgatgtaatgagtttacccctttgggagtaagtattattaatccatgtcaaagagcgttaccctccggacccggagggcaggaggaggttattgcggttcggcggatgaaccgtcctgagcgggagaggtattggctggcgcattgccgctgctggtgcgggtataaagaattttatgcgtgtcgttcgcgcaatggcccaccacctgtgagtccggctgatcggcctggtcgttaggaacgatagtgagcgtaaaattatccgccggcacgccgttattgatgatacgttgttcaatatcgctttttactctctcgcacgatcccggtgccgccatcaccagcgagggggcgctaactaacgccagagcggctattgcagttgcgattttcatcatgaactcctgtgattaatgacgatgttctaagcttagcatttttcgtgtaaataactgtatttgctaatatgatgataaatatcttttcatcctggtgatacgtgtgaagaaaccccttttactgacgttattgtgcatgatactggcaggttgtgataacccgaaatcccttgagtcttttacgccggaaatggccagtttttcgaacgaatttgattttgatccattacgtggtccggtaaaggatttcagccagacattgatgagtgagaatggcgaagtggcgaagcaggtcaccggtacgctttcacaggaaggctgttttgatacgcttgagttacacgatctggagaataatacggggctggcactcgtgctggatgccaattattaccgggatgctcagacgctggaaaaaaaggtgcagttacaggggaagtgccagctggcggcgttgccttcggcgggcgtgacctgggaaacggacgacaacggttttgtggtatcggcgacgggcaaagagatgaaggtcgagtaccgctatgatagcgaaggctatccgttaggtaagacaaccataaactcgcagaatacgctctctgtgacggcaaaaccctccgcggacccgcgtaaaaagctggattatacggcagtcagccgggtggatgatcgacaggtcggcaacgtcacacagagctgcgaatatgatgcgtacgcgaaccctgttgactgccggcttgttatcgtcgatgagagcgttaagccggcagtgtcccaccattacaccattaaaaatcgtatcgattactactaaaccgggcgcggtgcgactctccgtgactaccgcgccgcgcttactgcgcggtgggtttcaggagtgtagaaccggacgttttatgttcatccagatactgctgctggaagatacacatgcggatggtgttacggtattcgccgttaatgaagaactcatgaatcagctcgccttctactctaaacccgagtttacggtagatgtgaatcgctttttcattctctttatcgacgatcaaatacaatttatagagattgagtacggtaaatccgtaatccatcgccagtttggccgcgcgtgacgccaggccttttccctggtactccggcgagataataatctgaaattccgcccgccgatgcacatggttaatttccaccagttctaccagcccggcgttttcaccgtcgcattcgacgacaaagcgccgttcgctttggtcgtggatgtgtttgtcgtagagatccgacagttcgacaaaagcctcatacggctcttcaaaccagtaacgcataacgctggcattattatcaagctggtggacaaatcgtaaatcttcacgctcaagcgggcgcagtctgaccttgtagtcacttgtcatactgtatccttacacttccttttagttatcctgcatcagggcgtaataacgcgacctgtacgacgatccagacaccgcagcgtattgggctcccaataggcgttgatgttggcgctttgctcgcatttatcgcggttatcaaaggcggcatcggctttgtcccactctttttctgcgcgggtattcactttctgacgcagactgcgagtgtcgttccattgttccttttccatcgccgcttcctgacgactttgtgcgctatctcccgattcaatcaccagtttactggtttcagcgaatgcggaagtagtatatacaacggccgccaacgtaagcattgccgtcaggcacaggcgtttgctcagcgtattgttcatcacaacatcctttcattagaggggaaaaagcggtaaaccacctgtaaattctacaccaatccttatgcctggcatatacacaagaatggccggataaccgtaacgatattctgttgtattatcacttatcatttcgtaaccaaatgaatctcatgctaaagacgactctgcttttctttgtcaccgccctctgtgaaatcattggatgttttcttccctggctatggcttaagcgcggcgccagcgtgtggtggcttctgcccgccgctgcgtcacttgcgttattcgtctggcttttgaccttgcatccggcggcgagtgggcgggtttatgcggcttacggtggggtatatgtctgtactgcgctcctgtggttacgtgttgtcgatggcgtccggctcacggtttatgactggtgcggcgcgctgatcgcgctgtgtggaatgctgattatcgtcgtcggatggggacgtacgtaacattgccgcgcgaccagaacattttgtgatctggcagcgctttttacatcaatatacttgtatggtagtagctcagttgggtaaatttcctgcatcccataatgcgatgtaaggaataaaaatgaagattgtaggggctgaagtttttgttacgtgtccagggcgtaacttcgtcaccttaaagataaccacggaagacgggatcaccggtctgggggatgccaccctgaacggacgcgagctcccggtggcctcgtaccttaccgatcacctgtgcccacagctcatcgggcgggatgctcgccgcatcgaagatatttggcagttcttctacaaaggcgcgtactggcgccgtggccctgtcaccatgtccgccatttccgcggttgatatggcgctatgggatattaaagccaaagccgccaatatgccgttgtatcagttactcggcggcgcttcgcgtgaaggcgtcatggtgtattgccataccacaggccacaccatcgacgatgtgctggaagactacgcgcgtcataaagagcaagggttcaaagcaatccgcgtgcagtgcggcgttccggggatgaaaaccacctacggcatggcgaaaggcaaggggctggcctatgagcccgcgacaaaaggccagtggccggaagaacaattgtggtcaacggaaaagtatctcgattttacgccaaagctgtttgacgccgtgcgtaatacgttcgggtttaatgaacatcttctgcacgatatgcatcaccgactgacgcctattgaggctgcccgctttggcaaatgtattgaagactatcgtttgttctggatggaagacccgacgccggctgaaaatcaggcgtgcttccgcctcatccgccagcatacggtcacgccgattgccgtaggcgaagtctttaacagtatctgggattgcaaacagctcattgaagagcaattgattgactatatccgcaccacgcttacccatgccggtggtattaccgggatgcgccgcattgctgattttgcctcgctctaccaggtgcgtaccggttcgcatgggccgtccgatctgtcgccggtttgtatggccgctgcattacatttcgacctgtgggtgcctaactttggtgtgcaggagtttatgggctactccgaacagatgctggaggttttcccgcataactggacgttcgagggcggctatatgcatccgggcgacaagccaggactgggcattgagttcgatgaaaaactggcggcgaaatatccttacgatccagcctatttgccggtggctcgcctggaagacggcacactgtggaactggtaaggagcgaaaaatgaaaagcatcgtaatcgaaaaaccgaatacattaactatcgaaacgcgcgcgcttccgcagcctgcgccgggcgaagttcgtattaaagtgaaactggcgggtatctgcggttccgacagtcatatttatcggggacataatccctttgcaaaatatccccgtgtcataggccatgaatttttcggtgtcatcgacgcggtaggcgacaacgtcaatcacgaccggataggagaacgggtatccgtcgatccggtgatcagttgcgggcattgttacccttgttcagtcggtaaacccaatgtgtgtacctcgctggtggtgctgggcgtgcatcgtgacggcggtttcagcgagtatgcggtggcgccggcccgtaatgctcatcgcataccggacaacatcgcagatcatcatgccgtcatggttgagccgtttaccattgcggcaaatgtgacgggacaagtgaatccgaccgagcaggacgtggcgcttatctatggcgcaggcccgatgggactgacgaccgtacaggcgctgaagggggtttatcaggttaaaacggtcatagtcgttgatcgcattgaagagcgtttagcgatggcgaagcagagcggcgctgactggaccctcaataatggtcaacattcactggcggaatttctacagcagaaggcgctaaagccgaccttgattgtcgatgccgcctgtcatcccgctatcctgcaagaggcgattacccttgcatcgcctgcggcacgcattgtcctgatgggattttccagcgacccgtgtgagattgtacagcagggtattaccggaaaagagctggctatttattcatcgcgtcttaatgccaataaattcccggtcgtgattgactggctgaataaagggcttattgatccggataagctgataacgcatacatttgattatcaacatgtcaccgacgcgattgagcttttcgagaaagaccagcgtcaatgctgcaaagtcttactcacgtttgcgaaataatataaatacttgcgagtaagtggtacgcatcttacctcttagagattgcctatatgacacaaataaagcatgaacgatcgactcaggatttagtgcgcgctgccgtatctggctggttaggcaccgcgcttgaatttatggattttcagttatattcactaggcgcggctctggtcttccatgagatatttttcccggaacagtctgccgcgatggcgcttattctggcaatgggcacctatggtgcaggttatatagccagaattatcggcgcctttgtttttggtaaaatgggcgaccgcatcggacgaaaaaaagtattgtttattaccatcaccatgatggggatctgcaccacgctgattggcgtactgccgacgtatgcgcaaatcggcatttttgcgccagtattactggtaacattgcgaattatacaggggctgggcgccggggcggaaatttccggcgcgggtaccatgctggccgagtatgcgccgaaaggaaagcgtggcatcatttcctcgctggtcgcgatgggcaccaattgcggtacgttgagcgcgacggcgatctgggcggtgatgttctttgcgcttgaacgcgaacaactgatcgcctggggatggcgtattcctttcctggcgagcgtcgttgttatgatattcgcgatctggctgcgaatgaatctgaaagaaagtccggtattcgaaaaagtaagcgaaggtgaaaaatcgccagcgttaacgcctgcgtcagaaaatacattgggcgcgatgtttaccagcaaatctttctggctggccaccggtttacgttttggacaagcggggaattcagggcttattcaaaccttccttgccggatatttggttcagacgttattatttaacaaatctatcccaaccgatgcgttaatgataagttccgtaattggttttatcactatcccactcttggggtggttgtccgataaatacggtcgtcggctgccgtatataatattgaatatctccgcgattattctcgcctgaccgatgctgtctattgtggtagataaaacgtatagccctggcgtaattatggcggcgctcattgttattcataactttgccgtgctgggattatttgcgctggaaaacatcaccatggcggaaattttcggatcgcgtaatcgcttcacccggatggcgatttcaaaagaggcaggggggctggtggcggtcggttttggccccgtcctcgcagggatcttttgtaacatgaccgattcctggctgcccatcttaattatgctggtgctctactcgtgtattggtctgatttctgcgctgttgatgccggaggtcagagatcgcgacctgagtctgcctgaggatgcggcggaagcgacagcggcagagaagttacgccactccgcaacccagacgagttaaatcgtgtcgacggtatggccggaacgctaatgcggtttcggccatgctgtccggtcacttttgtttaattagcgtaaatccaaatgcaccagggcaggcgttactctgcgactgttccgctttcagaatatagaggttataaaatgcaaaacaggcttttatcggcaaaggcgacgcttcctgattacgatcgcgcggcgctggcggcgcggatggtccatctcggttttggcgcgtttcatcgcgcgcatcagggggtttacacagatattctggctgcggagcagcatagcgactggggctattatgaggttaatcttattggcggcgaacagcagattgccgatctaaagcagcaggataacctctataccgtggcggagatgtcggcggaagcctggacggcgcgtgtggtgggcgtcgtcaaagcggcgttgcatgtccaggttgatggtctggaacgtgtgctggcggcgatgtgcgaaccgcaaatagcgattgtgtctctgaccattaccgagaaagggtattgtcattcgccagccacgggccaacttctgctggaacatcccatgattgccgccgacctgcaaaatccgcatcaaccgctaacggcaccgggtattattgtcgaagcgttagcgcgtcgtaaagccgcaggcttaccggcatttaccgtgatgtcctgcgataacatgccggaaaatgggcatgtgacgcgtcaggttgtgacggcttacgcccgggaggtggatgcggaactggcgatatggatcgagcaaaacgtgacatttccgtcaacgatggttgatcggattgtccctgcggtcacgccggagacgctggataaaatcgaacaactgaccggcgtgcgcgatccggcgggcgttgcctgtgaaccgtttcgtcagtgggtgatagaggatacgtttgtggcgggtcgtccgctgtgggaaaacgcgggcgcgacgttggtcgccgacgtggttccgtttgaagagatgaaactgcgaatgcttaacggcagtcattcattcctggcttatctggggtatcttgccggctatcagcatattaatgactgcatggctgacgacaactatcgtctgaccgcgcaggcgttaatgttacgcgagcaggcgcccacgctgaaagtccagggggtagatttacagcgttatgccgatcagttgattgcgcgttaccgtaatccggcgctgcgtcatcgtacctggcagattgcgatggatggcagccagaaacttccgcagcgtatgctggactccgttcgctggcatcttgctaatcatagcgattttgatttgctggcgctgggcgtggcggggtggatgcgttacgttggcggcgtggatgagcagggtaaggcgatcgacgtcagcgatccgctattgccggttattcagcgcgccgtggcaaacagtgaagaaggcgccagtcgtgttaaggcgctgctgggaatggctgaaattttcggcaacgatttgccgcaggcggcgcggtttacgcaaaaagtgcaagaagcctatgacagtttactgacatatggcgcgaaagcgagtgtggcgaaatatgccgagcggttgaaatagcgtaacagagacccggtagcattatgctaccgggaaggccggagcggttcttagcggccagtggtatcagttcatgccaagacgaatcagttcgaccggcgcgaatttaccttcacaaccttcgacaatcaccgttttgccgcggcgaatttgacctgcatccagaccttcgctctcaatggctttgataatcccggtatgacccgtgccgcttatcatgacccggctaccggtagtgattgcgttacggttacgatcgtatgtcatcatggtgttttctcctttcaaacttacagccaaagcccgcaggtttccccgcatgacgggcgacatataaatacgcttatcgttgcgaattttttttgtttttgatcaagctcacggctttttaggcgggaatgtgcagggtgagaaagcggagaaggcgtctcaccccgacgttaaagggggttactcttcgctaaaccagccgctgttttcctgacggataagctgaacggattcgctaatttcctgcaaatgctgggtcattgcgctctcaaccgcattgccgtcacgattttccagcgcggagaaaatatcatggtgctggcgcaacaacatctccggcggagaaacatgatccagactcatatagcgaacccggtcgattgtcgctttgatattttcaatggtatcccacgctaactggcaatcggcgatctgcgccagcttttggtggaaatcgtcatcaagctggaaaaaatcatcaatctgtttgcgctcgatagcaatatgttgcaggtgcaggttttgcgccagttgatagcactggttgtcggtgatcatcgccgccgcacggcggaccaccgcgcattcgatcgcctgccgaacaaagcagccattctgtacctgagaaagcgaaatcttattcacataactaccgcgctgagggcggatctgaatcaacccattttccgccagctttataaaagcctcgcgcaccggttgacgcgaaacgttaaaacgggttgagacctctttttctgatagcggcgtgccaggcgggataagacaatgcacgatatcacgccgaagaatacggtaaatttgctggttgacaggctgtgtagggttaagctgcgtttcgacggtcattcattcttactttttaggcggttgacccggatactctaccacttttccgtggtggtctataccgatcatgtttctggttgcagatacgtttgccagggattacccggcccgcagaccgggtataaccccttagctacggtggacgctgagccctgcgaaggattgggtaacaggcatcatttcaacggtattaatattcacatgcgcggggagcgtggccacccaccataccgcttcggtaatgtcttctggcgtgagcgcggtggtattttcgtaagttttacccgctttctcatcgtcgcctttgaaacggacgctggaaaactcggtaccgccaaccagacccggttcaatgtcggtcacgcgaaccgccgtgccgtgtaaatccgtgcgcaaattcaggctaaactggcgcacaaaggctttcgtcgcgccatagacgttgccaccagcataaggccaactgccggcggttgaaccgatgttaatgatatgaccgcgattacgttcgaccattcctggcagcacggcgcgggtcatataaattaagcctttattattagtatcgatcatagtttcccagtcttctacgctggctttatgcgccggttcaagacccagcgccagaccggcgttattgaccagcacatcaatatcgcgccactgcgcaggcagagaggccatcatctcttcgatggccgcgcggttgcgcacgtccagttgggcggtcaatacgttctcgccaagctcatcttttaacgcttgcaggcgttcatgacgacgtcccgtggcaatgactttatgtccattctcaacaaaacggcgtgcaatgcactcgccaaaccctgcggttgctccagttactaaaacgatcatcacacagttcctcaacgctttttgtgttgtattaccatagcacgcggcgtttatgaaagggtaatcctggttaacacggttgcggtcagcatagggggaagcttactcttatgatcaacctattttcaggagtgaaaaatgtcgacgaatcctttgttagaccagagtatgttgccttatcaggcaccgcgttttgatcggatcaaagattgccattatcgtcctgcttttgatgagggcgtgcggcaaaaacgcgtggaaatcgaggccatcgtcaatcatccggcggcccctgactttacgaatacgcttctggcgctggagcaaagtggggcgcttctgtcacgcgtcaccagcgtttttttcgcgatgacggccgcgcacactaacgatgaactccagcggttggatgaggccttttctgccgagctggcggcgctctccaacgatatttatctgaatagcgcgttattcgctcgcgtggatgccgtctggcaacagcgtcactcactggggctggatgatgagtcgctacggttggtcgatgtgatccatcagcgttttgtgttggcaggcgcgcagcttgccgaagaggataaagcgcgactgaaggtattgaatactgaatccgcgaccttaatgagtcagtttaatcagcgtctgctggcggcaagtaaagcgggcgggctggcggtagatgacgcgcattgcctggcaggattaagcccggaagaaatgaccgtcgctgctgaagcggcgcgtgaaaaaggcctggaggagcgctggttcattccgctccttaatacgacgcaacagcctgcgcttgctacgctgcgcgatcgccagacccgcgaaaatttattcgcagcgtcatggactcgggcggaaaaaggagatgccaacgatacccgcgctatcgttcagcgtctggtagagattcgtcgctgtcaggcaaaactactgggtttccccaattatgccgcatggaaaatggccgatcagatggcgaaaacgccgcaagccgcactgagctttatgcgtggcattgtgccgccagcgcgtcagcgggtactcaatgaacaggcggaaattcagaacgtcattgatggtgagcagggcggctacaccgttcaggcctgggactggatgttctatgccgaacaggtacggcgggaaaaatatgcgttagatgaagcgcaactgaagccctattttgccttaaatacggtgttgcaagagggggttttctggaccgccaaccagctattcggcatcaccttcgtcgagcgttttgacattccggtgtatcaccctgatgttcgggtgtgggagattttcgattccgatggtgtcggcatggcgttattttatggcgacttcttcgcgcgggactcgaaaagcggcggcgcgtggatggggaattttgtcgagcaatccacactcaatgaaacccggcccgttatatacaacgtatgtaactatcagaaacctgttgatgggcagcctgcattactgctttgggacgacgttattacactcttccatgagtttggtcatacgttgcatggtttgtttgccgtccagcgttatgccacgctttcaggtaccaatacgccccgcgactttgtcgagtttccctcccagattaatgagcattgggcgagccatccacgtgtgttcgaacgctacgcgcgtcatgtcgacagcggtgaaaaaatgcctgctgatttacaggaaagaatgcgcaaggcgagtttatttaataaaggttacgatatgactgaattgctcggcgccgcattgctggatatgcgctggcatatgctggaggagagcgtagcagagcagtctgtcgctgagttcgagcagcaggcgctggccgccgagcatcttgatttaccggcagtgccgccccgctatcgcagcagttattttgcccatatcttcggcggcggctatgcagcgggatactacgcctatctgtggacgcaaatgttagcggatgacggttatcaatggtttgtagagcagggcggcctgacgcgtgaaaacgggcagcgttttcgtgatgctatccttgcccgggggaatagtactgatttagaaacgctttattcagcctggcgtggacatgaaccgcatattgaccccatgttgcaatatcgtgggctcgatcgctaagctgatacggttgttcggcactgtcgaacaaccgcctgaaaatgaatcctgaacttctgatgacagccagttaaatttatggggttaagttgtctgaatataaagagggcgtgcattcggatttttctacttatttttccgtggtggcttgattgccaaagatttattaccgcttcgctgttgatgttttcaaaaaatatatcttccgccatgtgatggtattatgtaaataatgcagaaatgaatttgacactgcgcacagggcgactagatttagaactgtatcacatgatatgagaagacatatcatatttaaaacgcaacatcatcatgaggattatattatggcagaacatcgcggcggttccggtaattttgcagaagataaagagaaagcctcagaagcaggtcgtaaaggcggccagcatagcggtgggaactttaaaaacgacccacaacgtgcatctgaagcgggtaaaaaaggtggccaaaatagccacagtggtggacggaaatccggcaattaattttactgctgatatttcataaatatattctgaaatattgcacatacgatgcgggccataggctcgcatttttttattctgaccgggagttattctgaccggtcagatgaaattattgtttatgctttcttcgttaacagaaaaagcaattcagcgagggcgaagcgtacgcatttttccaatacttcctgacaatctccgttgaaatgttgtcggcttgtaaaagttgtattgttaatattccaggcaaaccaaactgtgcccgccggcgtgccatcttcgccgccttccggaccgccatagccgctgatcgctatgctgatattgacctcagcctgatccttagcgccctgtgccatttcagtaacaaccgcttcgctgacggcggtatgttcggcaagactgtggcgttgtacgcgtaagatttttgctttggcttcatcagtaaaggtgacataccccacaccgtaaaatgagggcgtatcttctgctgcgcacaatgctgaagccagtttcccgccagtgcaggattctgcagtggtcagacggagtttctggttaaccagtaaatcaccaagtttttttgtcaggctatcgacggattcggcttcatcaagggtgacaatatcgtgctgttctaatctcatcgtttatttttccgttacagagacaaatgaaatctgttcgttcttctcaagtatggcatatttattttatgacattgtcagtgaatgattattttatccagttaccaacaaacccgctgttgcataacttgcttactttcttacggcgatgactgtcattgattatgtggaaggccattatcctcaaaaaataaagccgattattctgaattgctatccagacgttgatgcatatgacttcagctatgtggcaagttaactattacgccgttacgctttcgcgctcactggcgctgatatcggttgcatattaatccggatgggttgattttattgcttaatattctgcgggtaaattcatgtttgtaaaaactaaaaatagcggccagacttaatacgtcaaatagacgttattaaggagagagcatgaaactacaggtggctgcatttttaagttttctgataatgccttacgcgctagcggatgatcaagggggattaaaaaaagacgtggcaccgccgccgcctcatgctattgaggatggttatcgcggtacggatgatgcagaaaaaatgaccatcgaacaggcaaaaaccctgcatgatggcgcgaccgtttcgctgcgcggcaaccttattgatcataaaggcgacgatcgctatgtatttcgtgataaatccggcgagattaacgtgataattccttccgccgtatttgatgggcgggaagttcagccggatcaaatgatcaacattaacggtagcctggacaagaaagcgaaggaaccgcttgttcgcgtgaaccgactgcaaaaataacgcgcgctaaccggcaatctccaggtcagccatacggggcacgcggctggcctgataccatgggtcttgtaaaagcgcctgggggacaaaaggtcccataatgtcttattcaggtctggttgcgtatcgtttaagcttcattgatattgacggtgctacagtcgttagcgatccgttatcctcgcaagaatttgcccggtagcgtataagcaaaacacaaatctatccatgcaagcatttaccgctggtgaaccggcggtttttttttgcctgccatccagacaaaagcggccccttgcgcaacgatgcagcaaggggccggctctgcgagggattatctccgttcattaatcatcccatttgtgactgaaccaggcggccagaaatccggaaaataaaataattcctaatacaacgataaaaaggttaatactgcctaacatctcgtttctccttattttagtgtgcatcctcttttttaaaaaacctcgtacagactatagtactaatttatacttaagcaaagtctgaattgcgtatttattttactggaagggtaaagcattagaatattttcgtcagcgcccaggaatattcctgaattaccgcagtgacagcagataattagcctgcaatatatagggttaacccggtgcgccagaaactgcgcacatcactggctgcagataattaacaggtaatagcctgttgcgtaggggtaatccgcattccttttaacatcagtgcccaggcgaacacaatggcgattatcaggacaacgaaaagcgaccaggctggaagcgtcgtcaggatgacgccgctggccagcgggtttaccgccgcacccagccagcccagcgattgcgctgaaaaatagctggctttcatcccggcaggcgcaatgttgtcaattaacatatattcgccgggggcataaataatttcgccaatcgtgaatactgccgctgaaagcccccaaaaaaacagattgtcgcctgaaaaaataaatccgatgagcccggcgataaaaaagacggtgccggtcgtcatcattggtcgaatattgacggcggtaagtcgacggcccacggcgtattgcaaactgaccacaataaccgcattaaccggcaggacgacggctaccactttttccgcgaagccgctatcggcaacgaccataacgtactgtgaaatacaggacgcaaaggcgcccccacaaaggaggccagaaatgccgaaagcgtaaaccacaataatgctttgtcgcgcagcagaacggagggagaccagatagcggcatttttcccctcgctggcggcaaccgatcgtgtcacccatacctgaataaagaccagcgggaatgcggagcagatggcggcaagccagaagggtaaattgatgctttgcatcaccagcagcgtgccgagcggcgggccaaccgtccagccgatattgagtacggtatagttgagcgaaaaaatccgtgtttttgttgtcgcggtgagattatcggcgaaccaggccttcaggacggtagaaaaaaccgaataggcgcagttaataagcgcaaaaagcaggacaaccagtacgacattatgcaccattgggatggcgataaatccgcaggcgaaggcgataatcgcgagtaacatgtagcgctttttatcaaacttgtccgccagaatcccaaagccaagactaaagatgacgccgatcgttaacgcgctggtcagcgcgtagccaatcagatccacgcctaaaccgtactgacggttaagatagatggtcataaaggggagcgtggcgccgcgtccaattgtcaataacagcgatgaggcgagtagagccaacgtcgaacgtctcaatcctggattcatttttcctgcctgaaatggaggttacgtatcgggacgttttaatctaccgtgcccgcaaaagcatgatgtctatacgctatagcgtagtcttaacataccataacgcaggattttgcccatcgtgtgttgttcaatgccatgctcacggtaaaaagaaaagtcctgttatggcgcactgatttccgataacttacctttttacaaaattttaataatgacaggggccgatgatgtcgcgtaaagacggttttttggcgttactggtggttgtcgtatgggggctcaattttgttgtcatcaaagtaggcctgcaccatatgccgccattattgctggcaggattacgatttttactggtggcgtttccggcaattttctttgtcgcccggcctaaagtcccgcttacgctgttgctgggctatgggctgacgataagctttgggcagttcgcctttctcttttgcgcgataaagtttggtatgcccgcaggactggcgtcgttggtattacaggcgcaggccttttttaccatggcattgggggcgtttgtttttagcgagcggttacaacgtaagcagttggcggggatcgccctggcgattataggtgtactggtattgattgaagccagtctcaacggacagcatatagcgatgtcgggatttatgctgactctggcggcggcatttagctgggcctgcggcaatatctttaataaaaaaattatgcaacatagtccgcgcccggcggtgatgtcgctggtggtctggagcgcgctgatcccgatcctgccgttcctgctgtcatcgctgctactggagggggcggatcacattacgcaaagccttattaccatcgatatgacgacgatattgtcgctgctttatctggcttttgtcgccactatacttggctacggcatctggggcgcgttactggggcgctatgagacctggcgcgtggcgccgttatcattgctggtgccggtagtcgggctggcgagcgccgcggtgttactcggggaaacgttgaccgggatgcagcttgcgggcgcagtactgattatggctggactctatatcaatgtgtttggatttcgtgtgcgccgtactgcgcgtgtcagcggatgaggcattatgttactaagaagacaaacgctaatttcagaccatgccgcggggtaatagcggcggacttgtcatagccagacggtactaaaaaaatgccccgcaaaacggggcaaagaggttaaaggtgttggtcgttataatagggcacgcctaattcatctgacttatcgctgttcacgctcacggggtgaaggtcatttggcggatcgcctacacagggcagcagcatcacatcgcggctattttgcgccacaggtaacaaagtttgttctgcaatgccatatccggaggcgataagtaacagacccggcagggcgggaaacagcattttcatggtgctcttcgcgtggcgcataaacaaactagtagttgccatggttcagcggcagcatataccgtgattcgccatgcatattggtgatccggtatttgtgtggcggcacatcaaaatagtttttgaacgtccgggtcaatgtttgctgtgactcaaagccatagcgttccgccagatagagaatgggctcgttgctctcttttaatttttgcgcgatttccgtcattttacggctgcggatgtattggcctaatgaatgaccggtctcttttttaaacatccgttgcaggtgccatttggaatatcctgaacgctcagacactttttccagtgagagcggcgactccaggttatcctcgatccagtccaaaatgctatgaatagtaatagcgtcagtgttgcgtctggacatcgtcatacctcttttttgtctacggcagaattttcttgagcaaatactcaagcgttgccacttcgtccgccgttaagttttttgttaattcctgatgcaggtcttgccctggtcgttgatgacattgctcacaaattgccgcgccgtccggcgttagcttcaccagtacgccgcgtttgtcattaggattcggcagtctttcgatccagcctttgcacagcaggcggtcgagcatccgcgtcaatgcgccgagatcgacagacagcacttttttaagttcaaccggggtaatacatcccgcgcagcgtatcgagcaaagcactttaaactgtgttgcggtgatatccagcggggataaatagttatttaacaggcgatcttttttctgatttaccatgtagatcaagcgacccagcggaatgatttcattgaacagatcactggtgcttttcaaaatggttgccccggcaagtaattaatttcgtcagatactattgcccaggcaagtataagtcaactaaatgaattggccgatgccacgatttgctaaaaggcgtccggggtattgtgctgtgataacttgtaactaattgataattacaggttataggttgtagaggatattaacttgcacactggcgaaatggcgcgcctgggcaatttcactttatacttccggttcatgaaacgctgatgggtaagagatagtattatgatggatttgtttaaagcgattggattggggctggtcgtactgctcccgttagccaatccgctaaccaccgtggcgctgtttcttggccttgcgggcaatatgaatagtgcggaacgcaaccggcagtcctatatggcttcggtttatgtcttcgctattatgatggtggcgtactacgccgggcagttagtcatgaacaccttcggtatttcgattccagggctacggatcgccggggggttaatcgtggcgtttatcggcttcagaatgcttttcccgcagcagaaggcgcatgagtcgccggaagcgaaaagcaaatcggaggagctggcagacgaaccgacggccaatattgcgtttgttccactggctatgccaagcaccgcaggaccggggaccatcgcaatgatcatcagttccgcttccacggtgcgtcatggcggcgagtttcccgactgggtcattatggtcgcgccgccgattatttttcttgccgtggcggtgatcctgtggggatgcttacgcagttctggcgctattatgcggctggtgggtaaaggggggattgaagcgatctcccgcttaatgggattcctgctggtgtgtatgggcgtgcaatttattatcaacggcgtgttggaaattattaaaacgtaccactaaggcgcattttcgtctgccggaaacctgttcccggcagacgaatgtcttaatgcggttgttcttccagcgtcactggccatttgcggaatatgagcacagcccataccagcgcggcacaggcgggtatggcgccaatatagccgatggccgacattgaccagtgcaaactcacctgattacctaccagcgcgccagcgccaataccaatattaaagatgcctgaaaatagcgccattgcgacatcggtcgcgtccggggccagcgccagtactttcacctgcataccgagccctatcaccataatcgcgatgccccagaaaatgctcagtatggccagatgcgcttcgctctccgccgcgggcagcagcagcagcagacagacaaccagcagggcaatagcgatactgacgagcgacgaggcatggcgattacccagtttaccaaacacgaggctgccgatgatcccggcgccgccgaggatcagtaacaggacggtagcaaaattcgcactgagcccggcgacattctgaacgaacggttcaatatagctataagctgtgtaatgcgcagtcaccacaacgacggtcagtacatagaggctcatcagcgccgggcgtcggaatagcaaaggtaaactttttagtgagccggaatgctcgctcggcaatttcggtagaagcttaatcagacatagcagcgtaattaatgcgcccatgccgatggcaaaaaaggtggtgcgccagccaaaatactgaccaacaacgcgacctatgggcagcccaagcaccatggccaacgcggtgccggtcgctatcagacttaatgcctgcgcgcgtttcccggcaggggccaggcggatcgccagcgaggcggttatcgaccagaaaatagcgtgggcgaaagcgataccaatacggctaatgaccagcacggtaaagttccatgccagaaaggagagcacatggctggcaataaacaaaacaaacagataaatgagtagcttacggcgctccatttgactggtaagaagcataaaaggcagcgacatgacggcaactacccaggcgtaaatggttagcatgatgccgacctgcgcggtttgcatatgaaagctttcagcaatgtctgatagcaaaccaactggcacaaattctgtggtattgaaaataaaagcggcaatagcaagcgtaactacccgtagccacgcgaccttgcgggaaactggattgattgtcataaaaatatttcgggttagttgcgagaaggtgagaccgcgatcttaaaacgtttactggcgaaaagacaatcattttgtgacctgcttctcatttacttcgcaggccgtttcgtcttcagtcggtgctcgccagttgggcgttaagtaactcgataaaggcctcaagctgacgcgtcatcgccccgcgccgccacattagccatgtgttaagccagcgccacttctccgccaacggccaggcttccacctgatgatgtcctggcatactgttgagcatacttgctggcatcagcgcaatacctgcgccggcaattacgcacgccaacattccatgatatgactccatttcgtgaatcgtaccgggggtcgcgccatcggcatgaaaccagctttcgaaatgccgtcggtaagaacagttggcgcgaaaagcatagatgttataaccattcacctcgctggcccgcgaaacgacggaatggccgtgtggcgcgacgatcatcatctcttcctggtaagccggtataccttccagccccggatgcattagcgggccatcaataaaggcggcgttcagctttccctcgagcacgccatccagcatggcgccggaaggaccggtcgttaacgcgaactgaattttagggtaacgctggttataacccgccagcagcgcggggatacgtacggcggcagtactttctaacgcgccgagtgaaaacagtccttgcggttcctctccggcaaccaccatgcgggcttcatcgaccagcgccaggatctgctggctgtaacgtaaaaagttatgcccggctggtgacagcctgagtcgctggttttcgcgaataaacagagagacgcccaggtcggcttcaagctgacggatacgcgtggtcaggttggacggaacgcggtgcacttttgccgccgcctgcgtaatgctgcccgtcagagcgacagcgttaaacatttccagttgcgtcaggtccatggttttctcaattcgtgaatagtctggttaatattattcatttttcagaaagggtaaagggcgtcatgatggtacaactcccctgataacgagagaaagaacatgaccatgatgactgcaacacaggcgttatccgtgaatcctgcgaccggccagacgctggcggcaatgccctgggctaacgcgcaagagattgaacatgcgctgagtctggcggcgagcggtttcaaaaagtggaaaatgacatcggtagcgcaacgggcgcaaacattacgcgatattggtcaggcgcttcgcgctcatgcagaagagatggcgcaatgtattacgcgtgaaatgggtaaacccataaagcaggcgcgtgcggaagtgacgaaatccgccgcgttatgcgactggtatgcggaacatggcccggcaatgctgaatcctgagcctacgttggtagaaaatcagcaggcggtgattgaataccgtccgctgggcgtcattctggcgataatgccgtggaattttcctttatggcaggtgttacgcggggcagtgccgatactgctggcggggaatagctacttgttaaaacatgcgcccaatgtcacgggttgcgcgcagatgatagcccgaatcttggcggaagccggtactcccgctggcgtctatggatgggtgaacgctaataatgagggcgtgagtcagatgattaacgatccgcgaatcgcggcggtgacggtgaccggtagcgtgcgcgccggcgcggcgattggcgctcaggctggggcggcgctgaaaaagtgcgtactggaactgggtggctcggatccgtttattgtactcaatgatgccgatctcgagttggcggtaaaagctgcggttgccggacgctatcaaaacaccggacaagtctgcgccgccgccaaacgttttattgtcgaagagggcattgcgcaggcgtttaccgatcgttttgtggcggctgccgcagcattaaagatgggtgatcctctggttgaagagaatgacctggggccgatggcgcgctttgatttgcgtgatgaactccatcaacaggtgcaggcttccgtcgccgaaggcgcacggctactgttgggcggggagaaaatcgccggggagggcaactattatgccgcgaccgttctggcggatgttacacctgacatgacggcatttcgtcaggaactttttgggcctgttgccgccattaccgtcgcaaaagatgcggcgcacgccctcgcgctggcgaatgacagtgagtttggcctgtcggcgacgatctttaccgccgacgatacgctggccgcggagatggcggcgcgtcttgagtgcggtggggtattcattaatggttacagcgccagcgatgcgcgtgtggcattcggcggggtgaagaaaagcggcttcggtcgcgagctttcgcactttggtttacacgaattttgtaatgtgcagaccgtctggaagaaccgcgtctaatcgccctgacgtcgcgtggcgccctctgctatactcgcaggccttttcagacctgcgagcaaggagcatgttgtggccagggccatggataatgcaattttagagacgattttacagcgcgttcgccccctcattggccagggcaaagtcgctgactatattccggcattagcgtccgtcgaaggttcaaagctggggatagcgatttgtaccgtggacgggcagcattatcaggcgggcgatgcgcacgaacgcttctctattcagtctatttcgaaagtgctcagtctggtggtggcgatgcgtcattatccggaagaggagatctggcagcgcgtcggaaaagatccttccggctcgccgttcaattcgttggttcagttagagatggaacaaggcatcccgcgtaatccatttattaatgcgggcgcgctggtggtatgcgacatgttgcaaggccggcttagcgcgccgcgtcagcggatgctggaagttgtgcgcgcgctttgcggcgtatcggatattacgtatgacgctacggtcgcgcgctctgaatttgagcattccgcccgtaacgccgctattgcctggctgatgaaatcattcggtaattttcatcatgatgtgcctaccgtgttgcaaaattactttcactactgtgcgttgaaaatgagctgcatggaactggcgaggacgtttgtctttctggcgaatcagggcgaggcgtttcatctcgacgagccggtagtgacccccatgcaggcccggcagattaatgcgctaatggcgaccagcgggatgtatcagaatgccggcgagtttgcctggcgggtgggattgcccgctaaatccggcgtgggcggcggtattgtcgccatagtgccgcatgaaatggcgattgccgtctggagtccggagctggatcctgcgggaaactctctggcaggtatcgccgcgcttgagcaattaacacaaacgttaggacgttcggtatactgatgaatgcgcttgaaccgctctttgcccgcctggcgcgatcgacatttcgttcgcgttttcgtctcgggataaaagaaagacaatattgctgggataaaggcgcggaggtgattgataaacacgccgccgattttatcgcccagcgactggcgccagctcacccggcgaatgatggtaagcaaacgccgatgcggggccatccggtatttatcgcgcaacatgcgacggcaacctgctgtcgcgggtgcctggcgaagtggcaccagatacctcagggagaaccgctgagcgaagcgcagcaacagtatattgtcagcgttatccattactggctggtcatacaaatgaatcagcggtagagcagcgcgtcgttgctgacgctttccctgataaattaccctcataccactgatagcagccgttgaccgtcatatatctcatgcgctgaagcgcatatttagttacaacatacagttagttgttttttttcaacgcctgtcagcactgtgcaaaaaaatgttctacagggcagggaacccgtgtatcaccagaagcttgcaaccttgatctggatcacgtttaatgacagtgctttttcaccagctgaagataatcatgatcgttagaccacaacagcactggattcgcctgatatttgtctggcatggttccgtgttatctaaaatcttttcacgactactccttaactttcttctttctatcgccgttattatcatgctgccctggtacacaatgctgggtattaagtttacccttgcgccgtttagcatactgggcgtcgctatcgccatttttcttgggtttcgcaataatgcctgttatgcgcgttacgtcgaagcccgacatttgtgggggcagttgatgatcgcttcacgctcaatactgcgagaggtgaaaacaaccttgcctgatgaacgcggtatcgaggattttgttcggttacaaatcgcttttgcccactgtttgcgtatgacattgcgtcgacagcctcaaacgcaagttctgggaaactatcttgaccaggaggcgttacagaaagttgtcgcttcccattcccccgctaaccgtatcttattgctgatgggagagtggctggcgattcgccgccgcagcggaaagctttccgatattttatttcatagcctcaacaaccgcttaaatgatatgtcgtcagtattggccggctgtgagcgcatcgccaacacgccggtgccttttgcctatacgttaattttgcatcgtacggtttatcttttctgcattatgttgccatttgcactggtggttgatctgcactatatgacgccgtttatttcggtgctgatttcttatacgtttatcgcgctggatgcgttagcagaagagttggaagatccgttcggtactgaaaataatgatttaccgctggatgcgatatgcaatgcgatagaaatcgatttactgcaaatgaatgatgaaagggatattccggcaaaacggataccggataaacgctatcaactgacctgagctcgacttaactggcgcagaatgttcatctgcgccataacctgaatagcaaagtttaatagccttctccaacgccggttttggctggaccggagtagtggacatgaacgattcgccatcctgtgtttggtatcttcgcccacacctggctttcgcggcctgtcgtgtgttgagtctgcccattatcacggcgtaccgcggtaaaatgccagtcgaactctgcaacggcggcattgccatacacatgaatagcagggggagcgtccagttttaatgtgcgtttgctgaaggttttacccatagtggtgccataaaaattttcagcgatctgcgaccatccgcgttcgtgaccgcgtggatgaataaaactggtttccggtgaaacataaaagagctgcttgcctaacgttgggtctgccttatctattgaataaaggtaacggttaatgccttctgtaatttcttgtttaacggtcgacgtagcttcattttgtgcggcggttggcgttgccgctgatgccgatgacgccatcagagttaacgttatcgcggcggccgaaaacaatagtgacgttttttgcataatagttatacccatatggtctgtttttgagacgctttatctttcctgttacgttcacctttatactaaaggagcatggctcacgaacaataaaaaacatccttctataaaactaccccgaaaagggagtagtgcaattaagaatatcgtatttgtttgtaacggcatgactcaaaatatcaacatttagagtttcagtattgttgttgtccattgacttacttttatttttattaccactggtaaatagttaatcttatgaatagtgatacacaaatgaccgtttgcgctatgtgataattaaccatagtaaaaatacacgaagcgaagaagtgctatttcagtagtactgatattttcataacgctaatttaaaaataaatgtaaacgtaacaaattatacacaaaaataagaagggctgtggcctcaactgactggattatgattccgtcttaccgaatgtcagccgaatgttcagtgccattctcgccctggcatccccgaccgtaagcctgttctctactggtaacccccttgttattacagcagaaaacagggcatatcattgatgtagtcatgcttaacttgcattttaacatcactaatacatagcaagctaatattacactttgaaacttaacgcacggtaattgttagtgatattgtcctggacagttccgcgagcaggctttgcggaaagtccaaaaataagacaaataaggcatataaaatgaaaaaagtagtggtgttatctgcggtagccgcagccgtaatgatggctggagccgccaacgcagcagaaatctataacaaggatggcaataaactggatttgtatggcaaggtcgacggcctgcattatttttccagtaatcatagtacggatggcgatcaatcttatatccgtatgggtattaaaggcgagactcaaattaccgatcaactaaccggttttggacagtgggagtatcaggtcaacgccaatcgtccggaagatggtgactccagcggttccccgcaaagctggacgcgtctcggttttgctggtttggcatttgccgatatggggtctgttgattatggtcgtaactatggcgtgttatacgacattggttcatggactgacgtactgcctgaatttggtaatgattcgtatgaagcttccgataattttatgaccggacgcgcgaatggcgttctgacttatcgcaataatgatttctttggtctggttgatggtctgaatattgcgttgcagtatcagggtaaaaatgacggcctgtcgaaagaaggcgatcctttaagtaataatgccagaaaaagtatcgcgtaccagaatggcgatggtttcggggcatcagcgacatatgatttgggcatgggggtgagcctgggggcagcctataccagttccaaacgcacgcttgatcagatgacgcaagataaatacgacaatggcgaccgcgctgaagcctggactggcggcgtgaagtatgatgccaataatatttacctggcggcaaactatacccgtacttatgatatgacctatatgggcgatacattgggcggctttgcacataaaaccgataactgggaaatggtagggcaatatcaatttgataatggcttacgcccgtcactggcgttcctgcaatccagagccaatgatgttgatggactgggttcgttcgaccttgtgaaatatattgatgtgggttcctactactacttcaataaaaatatgtccgcgtatgttgactacaaaatcaatctgctaaaagatggcaacccatcgaatcctaatacagacaacaccgtggcgctcggcttagtctacgagttttgataaaacttgctgattaagacagtttagggataccctccttttcccaaaactgtgtcactgcttaacctttattattgttaatttattcttttattatttcaggacgcttctggcgtccttttttattgactattcgttgactattcgacttcgatctcgcgaatgcgcattctgctactgtcatctatctgcactttgcctgaatgacaaaggggacaacagagtgtggatgtttgagaggtgaagggttgattacaggacagacaccaaccttgcgccggtgcgatagtaatgtggaaacgcgcattgtcagcaagggtatgacgagcggcgacgtccaggccaaaatgcagcgccggcacctcaacacaggccataacgccaatctccagccagacttgctttaccttgctgaactggtgatttactgcctgttcctccagcaattcgataatattttgcgccagggctaattcatgcatgggccagctccttcattcaacaatatttacggcgacacaaggatcaattacctgtaactgttgcgaccacaatgagagtggaatagtggccagttcgcgagcaatgacgccgtcaggttgggcgtgacgtgtggtaggcgagataatacggtaatcaagaatattgcctgacgtcgtcagtctggcctgatgaactaaccatcctcgcgcggtttccactaccgctattttccattcgccatcatcaaaacgattccagcgcagggtgggaagggcgctcaaacttcgggcgagcgtaatgcagcgggccagcagacgtagcgcagtcgttttaccgctaagacaacaggctgacagcagcggatattcgatagccagaggcgagacatccaggggaccatgggttattaacgtatggtccggggacgatgccatcggtagtgtaggtgtaatgatattctgtactgccgccagccagcgggcggtttcagaacgctcttgcaaaaaccaggcttcccagccctttacgccagcggcaagccaggtctgaggatcatcgtcaaaaaagattgtgcttgccagcggggataactctccgcgacgtaacaacgcccattcttcagcggttgcctgtcggtggctaaacagggggagccagtctgtcaacgcgcgacggagcgtttctcgcgccagctcttgttgtgcggcctgcatatctggcttcttttcaggaaacaacagtaaagccgccgccgcgctgtgcgcctgagcgcacaacgtaaacaaacgtgaaataagcgtttttgcgtataccggcgttgcgccctgtaacaaacgaccgatcggcgcctcctgccagataatccgtagcgggtgagaatagacggtcaatctttgcacgaactattaccttcatcgatcaccataaacccggacttactggtttcgcaaaccggacagcaccagtaatcaggtaactggttgaagggcacgccgggtggaatttgccatacatcatcgcccagcgcagggtcgtaaacccaccaacatactttgcactccatgcgcaccactggctcattttctgtgaccgggtattctttcaaccattccaacgtattttttagccccgcgtaggcatcttcaatatcgtcgatgcctgcaacggcgatatcaggaatgtccgctatctcaatcatatcttgcagtaatgtattcatatcattgaaatagttgacccgccatacgccgggaaaatgcgtgcttacaatccggcatttaccatatccgcgtgaaaaaatagcgctacagccttcgcctaaaaaatgatccagatactcgcgatcggcatcgtttactggcaacagcgttaagttaatgatatgtggctcttttaccggctgttttacgcgctcggctatttcatgcgcgataaaggcgccattcatcaatcccgccggttgtggcggcaattctggcgtaatcggcggctgcggatgcgtctgccagatgctctctgggatcgggccaatgataatttcatcggcaacccgttgctggtcagcgttatattcacgcacacgccagacgcccgtaaaaaccgtctcctgaatacgctgttcttttccatcggataatagtacccgggcggagatttcaccttcgccgagcagttgatccaataaaccgctattctgttgctcagtggcattcagcttatagctcaggggaaaggggagcgttgccaccgggttatccatatcgcgaataagcgtagtcaggatgtgtctggcaacacggagctcagcgggcagcgcctgttccggtaaaaccggcgtcagcgggagattaatgccggcggggatgggaagaaagttaaagtcttcctcttctggctgcgatcctggtccggcaatattaacgactggaatagttctggaatgattcacgtgtgttacctttcattctattgcgtgataacgggaatatcctgacgatagcccggtgtggtcagcaatgcggccacccgctgagagtattcttgccagctatataatcccgccagactgccgacaaaacggtgctggcgaaagaaaagcagcgccggatatttcagaatgcgatactcccgggcgatcagttcactctgttcgctatccgcaaatgccgcggtataagacgtcgccggaaattgcttgaggatctccgggatgatgacccaactgtcggcgacttccggatgtttgttggggtcgctttgcagcaaaaccagcagagtcggatgcgcattaatcaacgacgggagcgtttgcgcatcggtaaccagaaagcctttatccgccagtggacaaacaggattttggggtgagatagtcatttttttaaatgctccggtaattcaggcgtgcgagacaataaatcggcaaaaccggtcagcggatcgctttgcgtgagcatggcctgttccagtgagtccagcgccgccagtacctcagcggcttccgcttcgtccatttctcgtcgtgctgcgccgccaaatgtcagcagccatgcgcctgctaaggggggagccacaagccgaatatcaacgtcgataagctcgccgtgtcggtcgcggcatttggcgaaccactgaccgggtgaaataacctgcacaggaacgccaatacacattatgatttctctctctgtagcacccgaatatcgccgacccggcaagcgctttgcgcatctgggcgttcatcttcgtagcgttccatacacaggctgtaatgattgagtctttcagtgggcaaggccgctgaagaggcggtgataccccattgcgccagcacttcctgcgcgagatagaccgcaggcatcagttgcgcctttacctgcggcgtaagactcccgccatagtcatccagacattccggctgcacgccaatcagcacaatctccgataactggccgccggttaattgcagcaatgccagcacttcagaaaaactggtctgatgtaaactgagttttttcgccgtcagataggcgggaacctgttcatcacgaaacatcgccagcgaacctggcgccataccaaaatcgatagcatccatgattaacagtttttcggtctgttgcagccagggcagcagcgccagcccctgcgtaccgccatcaacaacgtcaactttctcgttatcggcatactgttcaaacagcttttccgccgctctgacgccgaacccttcatctgcccaaagcaggttgccaagccctaagattgttacttctgccattgttatcacctgaaccagcgccagccgcttatcatgacggaaatcacgctttgtcggctcataatgtcttcgcggatagcggtataaacatgcgcaatgacgaaggcgataatgaaccacatgcccagccggtgccagaaatgcagcgcgaggctatcgttgccagtcaggcgaatcatccagccaaaccattgatacgcccaactgtctgttccaagtccttcgccatagagcgcaaagccgctacacaccatcagtacggacatccagaaatagaacattaccgccagtcccgctaccggattatgtccatagtaacgatgggcctctttttcgaggaaaaaataccagcggatttcgctgataacgcctttgcgccaggcgcggcgccagaacggaaccagaaacatctccctggcgtactcattgccgacacatgcccagtaaatacgaaacagcagcgcgacagtaaaaatatacgccgtggtaaaatggatcagtcgtatccagcccatccaaaacataaaggtcgcttcaccttgaatcgatggcagggggcggccaatgaaatatcctgtaacagccaggacgacaatggataacgccgtgatccagtgccataaacggaccggcgcttcatagatatagtacccctggctggttatttctttgagatgcattgagacctccgaatcgtcgtcatcgtacctgaaccctgaccagctcccctccatgattatcaataacatgggtggagcaggccaggcagggatcgaagctgtgcagagtacgtaaaatctccaatggttgatcgggaacggcgagtttagtccccattaacgccgcttcgtacgcgccaatttgacctttatcgtcacgtggcccggcattccaggttgtcggtaccacacactgatagctgtcgattttctgatttgcaatttttatccagtgccccagcgcgccgcgcggcgcctcgctgaaaccaacgccttttgccgatgtaggccaggtatcgggttcccagagcgtgacgtttgccgtcgccgtatcgccggacttgaggttacgcatcagacgatcgaagaaatattgcagcgtattgcctgcccatacggattccagcgcacgcgcggcagtacgtcctaatgtagaaaagagcgcttctttaggcagctttaatacactcagcagttgatccacgggttctttaaattccggtttattttgatgatatccaatcagataacgcgccagcggacctacctccatcgcatgtcccttccagcgcggcgatttaatccatgaatatttagcggactcatccacctgttcgataaaggtttttgtgcctttatagtgttcgcccatgaccagttgcggttcggtcagaccatcccacggatgcaggcccttatcgttattgccgttaccataggtataccaggagtgagtgacaaactcctgaatctcatcgggggcggttaaatcgacaggatgaatttcgtcgaaacgaccgttaatgatagccccacgcggaagcagaagattactggcggaataatcgttagggttatccggaaactcgccataagccagcaggttcatgctcgataacccgccgccgatttttgcccagtctttgtaataactggcaatcagcaagacgtccggaagataaacctgttcgcagaactggcgagctttttggatgatggaactgacaaggttcaggcgttccatattcactgcgccgaccgcgcccgtttcgtcaaggttgatggcgcaaggaacgccgcccaccagccagttaggatgcgggtttttaccaccgaaaacggtgtgaatttttacgatctctttttgaaaatcgagcgcttcaagatagtgggcgaccgccagcaaattggcttccggcggaagtttcatcgccggatgtctccagtagccattacggaaagggccaagttgaccggactcgataaaccgcttcagtcgattttgcaaatcgcggaaatatcccggcgaggatagcggccatgcggaaaggctttgcgcgatggcggaggtctgatgcgggtcggctttcagggcggcaaccacatcaacccagtccagcgcgtgcagatgataaaaatgcaccaggtgatcgtgaacgtgtagcgtagcctgcatcatattacggatacagtttgcgttgtccggaatcgcgattcccagcgcattttctacggcacggattgaggtcagagcgtgtgtaccggtgcagacgccgcaaatgcgttcaacgaatgcccaggcgtctcgcggatcgcgacctttcaggataacctccaggccgcgccacatggtgccggtcgacacggcgttagtaatgacattattactgtcgatattcacttcgcagcgcatatgcccttcgatgcgagtaaccggatcgaccacaattcgccgtccgctattgtccagcgtaaaaccctgagtctgataaggatatgccataattattttttctcttccggagcgttttctgatgacgtgttgtttttattgcgggcatgttttatggcgctcaccgtggcgtgagcgatggcggcagcgcccgcgacgccagcaacgcccagtccgattttatcggcggtagcctcaatgccggtttgcggaatgcccgttgcccggctgtaaaaagaaccgtaatcccagaatccatcttccgaacatccgaggcatccatgacccgactggataggaaaagacacgccatcattccagcgaacggttgaacaggcgttataggtggtcgggcctttacagcccatcttgtacaggcaatacccttttctggcgccttcgtcatcccacgcttccacaaactgaccggcatcgaaatgcgcgcgtcggtaacatttgtcatgaattcgctggccataaaacatttttggtcgtccaagacgatcaaggggagggatgcgatcaaatgccagcatataggtgataacggcggacatcacttcaggtataggcgggcagcctggcactttaataatgggtttatcggtaattaacttgtgaaccggcgtggctttagttgggttgggacgggctgcctgcacgcagccccatgatgcgcaggacccccaggcgataatcgctttagcatccgcgctgacgcgttttaacttctccaggaacggctcgccagccagtatgcaaaacatcccatcttcattcagcggcgcgttaccttccacagcaacgatataatttcctttgtactcacgcatcacatccgccaacgcctgctcagcttgttgccctgcggcggccataatggtgtcgtcataatccagggaaatgagcgacaaaatggcatcttttgccaacgggtgcgcagagcgaatgaaagattcggtacagcaggtacattcaagaccatgcagccatatcactggcgtacgcggtttattctccagggcataagctatttgaggaatcatcgaactgctcaggcctaaagacgttgcggtaaggctgcaaaacttgaggaagctacgccttgtcacgccgtgtctacgcataacttgataaaatgtatcttgtgtttgcataacgtttatcccaaaccactatagttagtgtgggcatcatatgttgcatttcttgtctttctcaacgtgttttagtagcaattatgtttctaattcgtaacaactgattacatgtgtgctactcacattactcaaaaacataaattaatttaatgttattggtgatgttgagtaaatatagcgttgtgatggcatctcttaatgttgataagaaaccgtgttttttatttataacatgatgggatttttttaaatggtcacacggataacgcgttttcatgttagctcgctctgtttaactctcctttaaacccgtcagttaaatttattagcttgtaaaataagatcacaattaattacgtgctgcataaccattgataggtttaatttaatatattcatccaatccattttacaaacaaggagagcatgatgaaaaaaagtaaagcaatgttatttatcgctccggcgctgttttcatacgccctggcggcacaggcctgcacgacccttgctattcaggataaacaaggcgatatttttcatgggcgtacgctggaatatatgcaggatttaccctcatggttaacgtattacccggcgggaacacagtttgataaaaaaacgccggatggcagccaggggataagctatcaggcgaagtatccgatactggccattacttccaccattactgatggcgatagcagagacatacttgaaggcatgaatagcgcgggattgtcatttagtgaaaacatgatcatgaatgcgcagttgccgccattgcccgcgagtgaatataaacaggcaattcctgtcacctcgttgggagaatgggcgctggcccgttttgctactgtcggcgaggtaaaacaggcaataaaagagggcaaattctggtcaccagaactgcatcggtttggcgatctgaaatcgccatttcattacgcgttttacgacaagaaaggaggaagcattgtcgttgaagtggaaaatggtaaattccatgtctatgacaatcccactcgcgtgatgacaaatggtcccgcattcccctggcatctgacaaatctgaataattatacgcaattaaccaatgtggaccgctcttcaggcacactgggcgggataaaagtgatgcagtctgatagcgggattgctattgcagacttgccatcgtccgatacgtcggtttcccgttttatacgcggcgtttattacaccacatatgcgccgcaagcgacatccgcccacgatgcaatgaatacgcttgcgcatattatgagccgtttcgatcgtccgaaaaatattacggttgattatatggggagtgaaggggaaggcaacgccacccgcaaaccggtctcagaatatacggtctggacaacgctgtctgacttaatgcacggtgagatgatggtgcgcggctacaatgatatcaactataaaacctggtctctttctcagtttaagaacgcgacagcgcccgtgttcgagaaaatcaacgtcaaaggataaatagctcatctcggtttagtttccccggtagtctcggcgaaggtaatggagactaccggcggttgcttctctttatcatgcacggtaattaattatcacgatcaccagcgccaggatggtatgctaaatccattcaaaatcccctggatatggattggagggcgcatggttatacctgaggtcaggcaggagaggctctatcagaagatagccaacctcatcattaagctgatcaatgataatatttttccaccgggaacttttttaccgccagaacgcgaactggcaaaacagcttggcgtgagccgcgcctccttgcgagaagcccttattgtactggagatctcgggatggatcgtgattcagtccggtaatggggttatcgtttcagataaaaaacaccttgccagcgactataccatcgaagaaattctctctactcgcgagctggtcgatagccattgtgcgcgcttagccgcacaaaacgataacgttgacgtcatcaaccaaatagaggcgatttatcatcgtatggatcaagccattaacgataataacgtccacggcttttactcgctggataaagagtttcaccttgcgatctctgaggccagccgtaaccgggtgttgttcgatatgtcccgtatgttatgggaacaacggattaatatcccttatgctgggctcgacgagcagtctggagacagaaatgttttacttaatctcaacaaacaacataaagcgatagtggatgcgatgcgacagtctgatgctgacagcgcctatgagggatcgctggaacatttacgctatgtgagaaagattgtcggcggctaattttgtcgatgaataacaccgcatggcggtcatgccatgcggtggagcttgccgtaaatcaatggaaaacagcattaatctttaagtagcgctccggatagcgatcaagttctttaactgcatcagggatctcatcaagattgacgaccttactgacgacatcttgcggattaatctccagcgtagacagcatacgtaatgcctcatcaaattcaccggcactggtgcgggaaccgcgtaaatccagttctttataggtgatcaggttcgtcggcagcgacgtttcctgttttggccatccggtaaacgaaatacgaccagcaaacgatgctaaatcaagcgtatttcgaatagcgctatttgcgccggaagcttctatcacgacctgcgccatggtgccgtgggtgatatttttaatagcgtcgataacctgatcgtcagcggcgttcagcacataaggaacgccaagcttttgcgcatagcgtagcctttcttccacaatatcgatcagaataggcgttgcctggtaatgacgcgcgcttaatgccgccataagaccaatggcccccgcgccgatgatggcaacatattccccggccttaacgtttgcccgatgcaacgcgtgcagagcgatggtcagcggttctgccagcggcgccatttcagaaggcacattatctggtattttatgaattaaatgtgcgggatgagtaaccacctcctgcattgcgccatcgacatgcacgccaatgacgtttaaattttcacaacaattagttctgccgacagagcaagggtagcagtgaccacaataaatataggggtcaacaattacgcggtcaccttctttaatattgtccggcattccggcgccttcctgaagaacaattccggtcacttcatgcccaataattcttgggtaagtaaccagtgggttcgttccacgaaaagccccgatatccgatccgcaaatgcctgcagcatcaaccttaattaatacttcattttctttcttatggggataatccacccagcgggtttcaacttcaccaggcttattaatgaacacagctttgactttcattggctttgaatcctttactttttacaaacacgaagaccaacaggcttgaaacgatagcgatagcaccagccagatagaacgcatagtcatatttaccgctaaattgaacgataaaaccggtgacaagcggaccgataatgccggatatattagccaggccatgcatggctccgccgacgctccctaccttatctttatgaacaacatcctgaataaccgcccaataaattgggcccgttaaatagagcaggaagagtgaaactgacatgagcgtaattgcgctaccaatagtgctaacagtaccggaaacggcaacacataccgctgcgcctgccagacatacgcccagaataagtcgacgtgagagcagagcattaccggtaatccgataaattacatcggaacagacgccgccgagtaccataccaatggcgccgatgacccagggaattaccgtggcgatactaatttctttaatatcgagatgtaacgaatggttcaggtaacttgggaaccaggtcaggaagaaaaaaagaatatagttgtagctgaaaaaagccagagttgtcgcccataccattggttgtttcatgtaatagccgagtgaaggcgtagcccggccatcatcagataaaataacgtcctcatgattttcaaaatcaatgcgttcttccggcgccaggcgtttactcattgttggcttatcgctaacgataaagtaccacagtagtacccagaccaggccaaataagaaaataatgccaaatgcggggcgccagcctaaggataacgccaacaggcccacaatcggcccggacaccgcgccgccgagcggggaaccggcgctaaaaattccgatcgccgtggcagactcctttcgggaaatccagttattgatgattttatttccggcagcgctgaccggcccttcagccataccgaaaagaacgcgcacgataagcattgtccacaatccggtgactaaaccagttaagccacaaaatacagaccatagtaacgctgcgatgagaaaaaccgtttttggcccaactttatcgctggcccagccaccaataaaattaaacagggcgtatccgataaaaaacgcgctgaagatcatccccatctccgcggcgttaaatcctaactccttttcgatcaagggggcagttatcgacaatgctgaacgatccatatagttgagcatgtaaactataaatagaagaaaaacgataagccatcccattgtttttcttttcatgattaatcctcttattgtggtctagcggcctgaccacaatattttaaggttattttcaaatcacctctcttgtggttagaacgtgatcaatataacaaaaatttatcacaggggatttttatccatcgcaagtgtgatggattaaattctttaaaatcagttgattaattgaaaattcaatcggagctatcgttttcccctaatccacgccccggtaaagtttgacatgcggcgttaacggaaggtggcgctgtctgtgggtatttttcatcgggcgtaatataaacctgactcgtggcgacatagccatcattaaaagttgcttcgatataggtagcttcccaacctgtcttcggttcatttagcgtaatactgatcttattgttgacgggactatctattgtaagcggctgatagcggataccacaggcataacgaaaatcacgcgcatttggattgttggctgtccagcgaacgacttttaccggcgcttctgagaaatagaccgtaagaaggtggtggtgaataaggtcgatcaactgtggtaatgtttttttactttgaaaccggttaataaatggaacgaggcttccttcagcgaactggttaattgagtagtggttcatattaggcactatacgtaatgattttacgccaggaagtttgctataataaaagcgagtgttgtctggtacgaaaaaatcatcgccacttgcattaataatatatttaggtattgcaaggcggggttggtaaatagtgttgagatatcttaacggatctattatttgccttagctgggtaaatgcgggggattttattttctcatctatgccttgctggtagtaggggtagaatgtaatgggccaatttccaccgtatgattgataaatatgctcaagtgaagcatcaatatcaagtagatcaatggcgaagggaacaattgcttcaacatcaggatcggcaatagctgacaaccaggtggtccacccacgctttgaaatacctgtaatgataaaggaatttatattccattgcgttaactccttttttgctaatctcatcgcttgcgatatggcagtgaccataggaatatttaaaggcattaacttacgttgctccggcgcttccataaataatgcccagcttcgggaaacgctttcgtcctctttcagtggttttttatcatcctgaaaggttaaatattggttaggtatatcactcactgatattacgatggtattcgtatcacgggagatgcttgccagtgtttcctgggggaaatcaccgggtttaccagtgatttgtacgcctttatcataattaattccgttgtttacaaccaccaaagcatggtgctcttttgccgtttcagggatataaatatcaacgttatgtcgccattgcgcaggggttaccatgtcatctggcgaccagtgttgcgataataattcatagtgtctgactaccacctgtgctaatggagctgtattaatcaaggtatattttagcggtgtgcctgaaatctgctcccggtagtcggggagaacatgagacaaatcacactccgggctgtttcgacaaaagaagatgttgttatgaagtagtgtataaacttttgtagaaatgaaaaacagtacgataacaacgagatatatttttttcatgctttccccgcgctttacaagggcaaatgccagccagcataatttccataaatacctcttaaacattcaatataagtacaatacttttgataaataacggaagaagggaacaataatgtttgtgacgttgtcacattattctgtttctggtttcactattagcactgaactttttgaaaggtaaatcattgccgtcaccagaccaataatggcgacagagatagctataccgatccagacgccatacagagcataacccaggacaaatccgcccaatacgggggatataaaatcagcgattgcgattaatgcctgcgccgttccgatgacgataccttgtcgggcaggcgatacatggacggacaaggcggcaagataagtgggtttggctagcgcatcagcgatgctaatacaaacgatagcaaaaacaagcacaggtatggtcgtggcgatacccgcagtgagaaatccagtacaaagaagggcgaagatgaggataattagctttcgctccgaaaaatattggctcacccaacctaacagaaatagctgaacgaaaatattaataaccccgtccgccattaacagatagcttaacgcttttggcccaaagggaagcccattccagatgaaggtgtcagaaagaaaaacaggtaattgtgaagagtacatgccataggcgaagaaatgacaaagcattacgatgattaagacgcgaaggacaggcatctttaaaatagcgcgggcagagaacgccgctattttatctgtggtacgtgatgttgtggaagggtcttttaacccccaaatcgcgaccagggcagacccaaggacaagtataaaggcggcgtagatcggcgcgctcagactgatacgcgataaccacccggaaacgcctgccccgacaataccgcctaaaccaatgcagcctgtgaggataccgattgcctgacgccgatttctgacgtgcgtacaatcggcaatataggctgcggcggctgacaaattcccggcgctaatgccaaaaagcgtgcgggcgagcaggataaacaggatacattgcgcgttggcgagtaatagtaaacttatcgccgcaatagccagcgtgacaatcagtattcgcttgcggccaacgcgatcggaaaggtggccaatcaggggcgccgcacaaaattggctaaaagcttcagtggcgatgatgattccaatgataagcggcgaaccgcccatctcgcggatataaaaaggcagtaccgacattacagccgcggtactggcggcgtaaaggccgacaagcaggaaaacaggcaaaatacgccgcttgttgagcggggtgatagtttcgctgtcggtgttctcatagacattagtattcatctttaatccctatggcaaaacgagagagataattttcaatatcgttgctctgtttgccgtgaaagaatgcgccgacatagccatcgggtcggatcagcacgcattgacccggcgccagatgataggattcccggaagtgccccagggtatcgatgagctcgtcctgctcgccaatgtgatgaatacgcagtcctcgccgcgcatcgatgaccttaccatgggtttcgtaggccaacagattccagtccggaccttgtagtaactgaaataatcgtaatgattggccgccggcgcccaaaagaggagcatccggagctctttctcccgcttgtaacccatgctgacgttcgggtaacgtgtgggctaagggggagttggtatactggatgtcaagttgttgaacatcgcgttctcgtttgatgcctctctgtttttgagagtcaagtaatcgggtagaaaggtggagcagtgattcggctatcgggcggcgttcctgttcatagctatcgagaagttcttctcctgcgccccgcagcgaggctgccattttccatcccaggttataggcatcctggatgctggtatttaacccttgcccacccgtcggcggatgcacatgagcggcatcaccggctaaaaataccttacccacacggtaatgttccgctatgcgcgcattcatctggtacttcgatacccagggaatcgaatggatgcgaacatccgtccgcccgattcgttcagtaagaaaagccgtgagcacgtcggctgagaaattctgcgagtcgtccggggccaacaacgcctggatttgaaagagctgcgtgccggcgagagggcaaatcgttatcatccgcgccatatcgccatcgttaaaatggtgccatacatcccggttcagaccggaaagtgaagcgtcagccacaagcgcatggattcccaacgtacgaccggggaagctgacgcctaatttttttctgacaaagcttccgccgccatccgcacctatcaaataatgcgcgatgatgacctcttctccagccggcccggcaacatacgcggtgactgtgcgtggggtttgcgcaaaatgtcgtaactcgcagccgaactccacccgatgtccccatgcttttaattgctctcgcataatcgtttctgtcacgttctgtggaaccatcaatggcagatggtagggttcggcgtgggtcggttttgtatgatgcgcaatatctgaatctacatagcttccgtcgtgacggtaggttcgtagtcggggatagagcccgccggcggcgaccactttattgagtattccaagatcctcgaagatttcttgcgttcgcggctgaatacctttaccgcgggagccgataaaaggcgtcgttcttttctcaatcaggcgaaatgagaccccgtgacgcgccagttcgatggctaaagtaagcccggtaacgccagcgccgcagatcagtacatctgtagtggtgtatcttgtcatcgtctctccgatatgtgtattatgcacataagaggagacatgctatgtcagaaaataaaaatgtgcaagatacacatatttccgagcaaatgaaggcgcttcacggtgcgttgattcgcgtggtgagcgcgcttaaccggcctcgtaatgatgagaaattaattgcagaggcggggatacaactcgatcgtgcgctattttcgatccttattagtatcgaacgtttagggccgattggcgttgttgagttagccgaacgtgccggtcgtgattatacgacggtaagccgacaggtcgccaaactggagaagctggggttgataatacggcagcataatgccatcgatcgtcgtatacgcgaggccgttatctcccgtacaggaaaggcgatgacggagcgtatagacgctgcgcgagagcaaatgggcaacgttgtttttaaagactggcctcaggatgaacttgatgtctttgttcggctaatgcaaaagtttgccgatgcaatggatagcgatgcttcaatgccggaataagcaaaagaaaagggcggtcaaatccgatcgtccaggctaatatcggtatctgacattgattaaatagccagcaaagtaaatataacaacaacatttatcgagttaattttcaccctttgaaaggccaacgtatactgcagaatacggctatataacaatcgccgtatcaatggtttttcaaagggtaaatatatgcttaccgaaaaatatgattttcgcattaccgatcagatgactatcccactcagacctcattggatagccaatgattcatacagggaaaagtgtaaaatgcttgtcctcaaccggagtaaaggggaaattcataaggtagactttagtaaattaacagattatatcaaagaaggtgatgtaatctgttttaacgacagtactataataaaccatatgtttatctgtaaaacaagacagaataggttaattaaaattgttttagagggatttttaccaaataatagagtaattatttccggacttttaaaagaaaggcttaacgcgaatgatgttttctatttggttgataaccctgaaatttccattaagatagagcaaaggtttagcgaggagagccagtaccgggccgtcgtggaaaatcatgaggccttaatttgctatttagccagtcatggtgagcgtcttgatgagtatgtggactccagcttgttttataaatatccagatgcttaccgttccgttttttctaaaaaatatggttctttggaaataccttctgccggcattcattttacctgggatcttatccaaagaatcaaagataaaggtgggttaatatccttcatcactttacatgttgcatcaacagaaatgttgtccaacagaaaaatacaaacaaaatgtgtagaggaagtgactatcaacgaagaatactacgaggttccacaagctacagcggatatcattaatactgcgaagcaaaatggcggacgtatttttgccgtaggaactaccgttacacgatgtctggaatctgcgtattcgagggaacacaattgcctcaaagcaagttctggctggactgcgctttatatacatccaggctatcaactgaaagtggttgactgcctgctaacgaacttacatcagccaaaaacgacgcatatggtgttaactggtcagtttgctggggttgatctactcattaaggcctatacctcagaacatatccagtcatgtcagttcgatatgtttggtgattgcatgttaatcatacaagatgaagggcagggatgaataaaataaaaccggtacatataatgctaccggttttaccgagaataagcatcaggggattcgggcaataacctttatttcgaaatcaaagccggccagccaggtaacgccaacagcggtccagttaggataagggggatgggcaaatatctcctgtttcaccgccatcacgtcgttaagttgttgctctggatcggtatggaaggtggtgacatccactatgtcatcgaatgtgcatcctgctgcagtcagtgttgctttcaggttttcaaaagcaagcctcacttgtttttgaaaatcaggctccggcgttccgtctgtgtgactgcctacctggcctgaaacaaacagtaaatcaccagaacggatggctgcggaatacccatgttcctcatacagagaatggcggtcagcaggaaaaaccgcgatacgttgcgtcataatgttatcctcagatagcgtaaacacttcgggcgggaataaaatgaatgtcacatacacaacgtaggccatagtttcatatacgtggcatatgtcaaggtgccgtcacataaaagaactgagcctgtttgtcgtatcgtttgacgggaaagagagcattttctgagtgattagcttctgtgtcgtgtcattttgtagacggcatcattttcacgctttccaacaccaatgacagttaccgtgataatttcatcttcgacgctgtacaccagcctgtatcctgcaccacgcagcttaattttgtactgatcctttcttccatgtaattgagaagccggaacccgagggttttcaagccgttcccttagcttttttttaaactgttcctgtatggtatgacccagttttttccactcttttagtgctgattcgttaaatgccagcttataagtcatcaatgttgacctcaatgacgcgttcattcgcacgctcatcgataatacgaccgagttcttcatcctcaagaatatccataagatgagcataaagtgccggaggcacacagtagaaagccggttcattgcggttaagaatggcaactggagcgccatctccggcattgaaagttcccattggatcacgtttcagttctgtaatgcttgctgcagtagtcgttaaaatttgaaatgccataatttacctcctggttgatgactaaatatagcacctttaatagtactaataaaagcatccttcacgaaggggattcagctccagcccggtcagtgatgcgggcagctgacggttttttcaaggctaatttcagatgtccagaacctaacttatgaccactgaaaccggcgtcaataactcgccaacccttatcaagcgtgatgtaacaaccgaagtcagccttgcagatggtgatattattttacttggtggccttgctgaacagtcggatggattattctggcctctgacgtgtcgcagattgcagatcgtacagtcagggattacaaccgtattgccagaggaagcgataaaatatggtaagtgatactcttgaacagcggatttatgaactggtaagaagccatgatggaatttacctttttaagaaaaaagaactgacaccgtcaacagatttggattcagatctacagctggaagatgatgaagtactggcattgatggatgatttttttacgacattcaatgtagataaagggaatttctcgatcacaacatactatccgccagaaccaccgctaaaacatttgcttaatccgtttcgcaaaaacgatattcctcaggtgccggatttcacgataggtatgctcattgcgtctgccagggctggttgctggttgtatgactgattcacgctgggggctgctttccgccctccgtcattattgtcaaggctatatgccctaacaagttataggctctataaagatatatattgaacgctaaaataatggactattaggtgacaccatgcccacttataaacaagttgtgaaccatgttaagaaacatgtattgtggaaagatgagtattttgaacgctattatcggctcaatcctgaactggttcagaagcgtttggataaaatttatcaagctgaagatgatctaatggtgcttatcagtactcaattattttgtttcttgcaggctaatggcacgctctattttgatggttgctataaaacagggaaagcagataactcattgctttgtactaatcttgctctatggagtatcgagctagcttgtgatcattttgatattcgggaagagcggggacataccacgaagtttagcgagcagggagagagttggttaacactattcgcctgcaatcaattctctttagttccttattgctatccggccattcagcgcgggtttcaaagcggcgtattgaaagaaattgttccgttttatcgtgaacagaaattgggtatcctggcgatggagataatggcgcgtgaacggggggatacaatcaactgggaagcaatgcaagtgcgtgttgatcctgtctatctggacttttgccaaaacattttattgtcatcagatgatgaactagtccgcaccggattaattacgctatgtgataagcatcttgagtggaccgattttcataatagcgataagcattgttgcttgactggctatgaaattcagcgtcaggatctattactctggccatttgaatatcaggcggtaaaaaactggcgagcacgtcaagggttaagtacaccaatgattgaacatccattgatgaatagcccgatgacgacagcgaattgtcctgacttttcgcagtggcagcgtccagagtggttcaatccgttagttgattttttggcgcagcgcaggcctgagctggcatttttacgacatctctttatttaagtgagcgattattgtccagttttctctgggcctggcgcgcaactccaagcacatgacccagtcttttattatcaacaattgcgacggggtccacctccgacaaccggtcgaaggtggaataggggagcagaacgccattcagccgcagttccttatgcccgtcaggataatgccagacttcgatatatttaccgatggcccggcgactgtgctcgctgtcctcaatctgtggattcagatttcacaaacagcaggtgcatcaggcgactggtggcatagtcaacatagaccaaagcagtacagggtcgaccccagctttcaaaccagtggtggtcgcagccatcaatttgtatcagctcgccagtacaaggccgcctgtaacgaggctgatgaattttcggcgcgcgttatctgcgagggatccagattccggcttttatcatgaggcgtcggatagtttccttgccaagaaccagaccgtgaacttcctccagattttccagcgccagcgtggggccaaaatcacggtagtgctcccggattatacagagtgcctgatctatcagtgaagttggcaacagatggttaccaacgcggccacgactatggttgttcatgccaagtggtccgagttggcgataacgtttcagcagccgtctgcaatggcgtggcgtaatgccgagcatctcagcagcctgaccgggatgtaaattgcggtcgatggcatcctgaaggattttgaggcggttgattcctttcacggtgaacatcccggcgtcatgtctgagaactatagtctggacaatatgagccacaaatagacattagcattgagcctctacaagattggtgcgcataatgtatattatgttaaattcaccagaacatttaaaagacatgttaaagcggctggattcgtgtatgtcaaaaaacttctggcccataagtttgatcccttccctgccgtgacgctgcgcgaattctgttgatttgcacccgcttatcctgcacacgatttcacgcagcacacgccacgcaggcataaaaaaaccggccactgtgaccggttcgtcgcgcaggtttttggctcagtgggttttaccctggtccgctgctttttctgactgatgttctgcagctctgacaacggctataaacgctttgatacccggatccacatccggcgacaacatgcgcattgttgatttggcattcctgccgaacctcgtcaaaaatcgcaggataaccgaacgtgactttaatcagcgtgcgcagcatccctttggccacttccatttcacccgccataattcgccggcgtccaggtcgttatgatactgacaatacactggaaaatctgacggtcaaagcagcaaccggggaaaaacagtggccagttagcacagcgtttgcatgaactggtggatagttcggggaatcagcggaagaccccctattctcaaccatctcctcataggctttcctgaacaatgtgattgtttgagtaactttacgacaattgcttcaaaaactatcaaatgccagacttccgctaccagacggtatacacagtattactatttctttttatatgccccatacaaaagcgatacgggtgttttttctaatatctggatttcatttttatgtgctttatgttcactaaaaatatctgccagacttttacctccaaaggccaggccaattcccgttgctgctgctgaaagtaatgtcaattgcggcatggcaagtgaagctatacctaacgtggctgttcctgcaaaaattaatccagatgagatcttttttttctttgaattcttaatggctgattcatgcgactttccatactcttcgaccacattgattaaatgttttgaaaaattatttgccgcatcttgcatttgatctggtgtttttccttgcaagtcatgccttgagattcttagttcatgccttaaggattccagttgacctctttctctaatcttttttaattccagatcggaaagcgcagtaaggaattttacttccgcggctgaaaggcccattgtaatcgcttgctcttcagaagaaagaggatttaatttaccataatccttgaccaactgctccgtagtccattcatgtaaaaacatatggttactataaataaccggatcaatgcctaatagtgttgccgataattgagttgatcgttgtgcataaattgcaccttcaaccttacccagtaaggttgctatagctgacggcagatcgtaatccagaagatctacctctcttgttgtaaaactctttaaatctgtatcgtaaacccagacttctttttcgatgttattgaaattattaagcaatgtttttaataattctttatttgttaggatcttctggaatgtttcttcgtttctcccaaagtgctcaagaaacgctaaataagtagcgtaatccatttttctatctttaaaaaagagctggcttagaaaagcggcagattgttcatgattgcgttctttatcaaaatccagtaattcaggaacgattagaaaaattggataatcatcatcaatagtcataaacgggatggcgcgaaatagattagaaacatgttcaagtaataccaacctgcgcatgcggacataactattatctggtggcaatgacaaaaatgaatgcagagagctaagagaaggaaaatgtaatggatcaaccattatgatgctatcaaaataaatccccagagatctaaggtgattagatatgttataaccaaagcgttgaatcggaagtaataatcgataacttttagacgcccgcacttctgttataagcgccgcggcgtgagtatcccaaaatttatttagcaacacgattaggtttgtaagttgattatctaactcgggagagctaattagctctttcaggatgaatctacgtaattcttttagttctaaatttctgaatgcatatttatatttttcagaaaaagcgttttccatcaataaaacatattcattctgtatgctttttgtaatactactcatcatctatctccggaaccaccacgcaacgatttcccagtgtagtggttcttatcatgtgtatattgttagtcatgttatcgtagaaaattcagtggtcaataactcattgaggtagctactaaaatttgcagttaccaggatttaggatgattttaaaaatgtttataaattcaggctgcgccgcagtgattgcactgatttccacgtaacatgataatcaatggctttgataccctttaaacgaacaaatatgagcttaacatggcgacaataaaggatgttgcatccatggccggtgtatcaaccgcgactgtatcacgcgtcattaaccagaccgcgtgggttgaacccgtcacgcgcgaacgtgtagagaaagccatgcgcgatctcaattatcgccggaatgccgccgctatcgcgctggcgaaacgcagcggcgatatgctcggattgttaaccggcaatctggctgatcctttttttgcccgccttgctcgcggcgtagaagatgtttctcgtaagcagcagtatcgcttgatggtatgtagcggcggccacgacgaagaaatggaaaaagcgggactggattttctggttaatcaaggttgtgaggctattgttgtacacgccagccgattaccggataaagagctgctgcgctacgcagcccactttccagcgctggttgttgtgaatcgttatatagccggtatggccaaccggtgtatctggctggaaaatcgcagcgccgccagggaagcgacccgatatctcctggcgaacgggcatcggcgcattgcctgtgtgacatctgacttgccaattattgatcgtcaggaacgccttgatggttaccgtgaggcgctggaagaatatggtatttctccagaccctcgctgggtgattagcgttccgtttaacgaagaaggcggcgagcgggccgcgcatcaacttattaatagcgggcttccccttacggcagcggtcacgtttaacgatgtgatggccgctggcattatgcgtattcttcatcaacgcggcgttcagcttccgcaacagctctctattgtcggctttgatgatgtggtgctggcccggtatctttatccggcgttaacaacaatgcattatccggtcgaacaaatggcgcgttgtgccgcgcaactggcgatacagttataccagggcattacgccgccgcccagcagcaatcatttcaatgccgaactggtgatccgcgattctgtcgcgccctatttttcacggtgaatgcgtcgtcaacagtaaaaactgtgatggctatcaaattaacccttctcatgtaatcggttacatggacgaaagtaatggatcacagtagtgggaagcgtatccccctacccttgagctaccttactgaccggagctccattatgagtgcatcacaaaacaagaagaaaacgctgtcattgggtttagcgctaatcccagtcatctccatgttgttattgttgattatcggttacggcattatggggctacgtatcgaaccgctccttctgtgctctgcggcggtagcggcaggcattgcatggtggcaaggatactgttgggaagacatcatcaactcagtggtggataagctggctaaagcaatgccggttatcatgatcctgatctgcgtgggcggtttgattggctcctggatgtttagtggcaccattccctacatggtgtactgggggctaaaactcataagcccggaatatattttgattgcagccttctttttaaccagcgtggtctccgtctgtaccggtacatcgtggggatccgccgggacggttggcgttgcgttaatgggggttgccgccgggctggacgtgtctcttgcagcagcagctggcgccgttgtttctggcgcttatttcggcgacaaaatctcaccgttgtccgactcgactaactttgccgcgattgtcgcagacactactctgtttgagcatattcagcatttactttggacgaccctgccaagtttcctgcttgccgccgtggtttatcttatcgccggacacagtaatatgctgggcgaggtggctacgccgcagcgcgttacggacatcatccactcgctggagtcgctataccattttaatattgttcttattttgccgccggtgatcgtactgtggggcgcaattcgcaaaaagcctgtcatcccattaatgttaagcgcctgcgtacttgccttgttcctcggcgtcatcatgcagggactgagcatcaaacagggactggacgctttcattgatggatttgatatcgccatgttcccacaaggcgcagaaggtgtcgtggccgatgttccgcgcctgctaaaccggggcggaatgttctcgatgatgggaacaatactgttagttttctgcgctttttcatttgccggagcgctaacgttaaccggcgcgttaacaatcatcattaaccgactgctgaccattattcatagcgttggtcaactcattgccgccactatcggcaccacaattttggtcacaggagcgaccagcgacggtaaactggcattgttagttcccgccgaactgtttaaagatgcctatcgtcgtatggggctggatactaaaaacctttcacggacgatagaagatgccggtaccgttatcgaacctctcctgccgtggacctcggctggcgtctacatggcaaccacgctgggcgttagcacgcttgatcttctgccctgggctatccaatgctatgcggcaatcttcttcgcattaatttatggttttagcagaattggtattgccagaactgcctccgcctcagaaaagtcgccgcaatcgtcagtgacggaataataaggaaacaagatggattttaaccagattatcaatcgcaacaatactggttcggtaaagtgggattttattgagcgtcactttggcgatggcgcagggaaactgctgccgatgtgggtttctgatttcgattttgcctgcccgcctgaggttcaggcggcattgcatcagcgaatcgagcacggcgtatttggctatagcgaacgcgatgaggcctattttaacgccctgcttcactggttttcatcacgccaccagctcacgttaaaacaagaatgggtatgcagcgtggaaggcgtcgtaccagggttggcgctcttagtgcaaatgttgacgcatccaggcgacggcgtagtggtacaggggccatactatggctccttcgccaaaataatcacgcttaatggtagaaaactgctggagaatccccttagcgagtcgccggacgatggctaccagatggatttttgccaactggaaaggctgtttcgccatgagcgccctccgctgatgattttgtgtaatccacataatccaaccgggcgttgctggtcggccaacgagctggagcaactgcttttattatgtgaagcttatgatgtcactctcatctcggatgaaatatgggccgatctattgctgcccggcgaaacctttacctcggtactgcatttaggggtgcgctggcataaacgggtcatctccgccactgcggccagcaaaacgtttggcttatcgtcgttgcgaatttctaattttctcattcccgatcctacgcttcgccagcgtttcctgtctcgtctggacgctcatgggctggatgtctttaacgccctctccgttcaggcggcgactaccgcatggaatgaaagcagacagtggctggattcgctactggattacctggcggaaaaccgccgctggtttgttgaacatgcgacagagcaccttccctgggcaagaattgtcccggcgcagggaacctatttattatggatggattgtaaaaaactgggactggatgacgaacagctaaaatgggtaatggcggatgtcgcgggtattgctccttcaatgggcagcggctttggcccggcgggcagcggatttatccgtttaaatctgggatgtccacgtacctaccttgaaatggcaatagacggcctgaagcgaatatcggtgaagacaatcaaaggaataccaacaggcggatgaatttttcgggcggtaaactgacaacggtgttatttctgcggcatgatatcgcctgagcgccagtaaaaaaccggccatcaaggccggttgggtccggagcgcggttttactatcaggggcgtctgaataacacgatactgcgcccggccagatcgaaatccatttcttcggtaatccgcattccctgctgcgcgttatcggcagtcgtcagttcaagtacccagccgccttctccccacatcggaatacggaacggtacgctgccttcaaacggattgaaaagcagtaaggcgtcatgccagatccccgcttccggctgaagatcgggacgactaatacatacgcctatggtcgatccctcatcccattgttcggattgctgcgcccctccgccggcgttaaaccagcggatctccagaccgtcacgccagctctcccggcgcagcaacggttgcgtggcgcgcagttgaatcagatgacgggtaaactcccgtagcgcattggcggtttccggcaaattatcccagtggacccacgatatttcactgtcctgacagtagccattgttattgcccatctgactgcggccaaactcatcgcccgctaataacatcggcgtgccgtgcgagaaaagcaaggtggtcaggaaattacgtttctgtcgctcgcgtatcgcattgatgccctcgtcgtcggttggcccttctgcgccatagttacaggagcggttatcattatgcccgtcattattatcttcgccattggcttcattatgtttgtcgttataagacaccagatcgttcagcgtgaagccgtcatgggcagtaataaagttaacgcttgaccaggggcgacggccgcgcaaatcatagagatcgccggaacccagcaggcgtgcggcgaaatcatttgtgacgttgtcacctttccagtgttcgcgtaccgtatcgcggtatttatcattccattcgccccaccctggtggaaagccgccaacctgatagccgcccggtccgatatcccagggttcgccaatcagtttcagttttgccagcaccgggtcttgcgttaccgcatcaaaaaaaccgcctctctgatcaaagccttccggctcacgaccaagaatggtgcccaaatcaaaacgaaagccgtcgacatgcattgactccgcccaatagcgaagggaatccatcaccatttgcagtacccgtggatgagaggtattgacggtattacctgtccctgtatcgttaatgtaatagcgatgctgatcgggcatcgtgcgatagtaagagaagttatcgatacctttaaatgacagcgtggggccaagttcattcccttctgccgtatggttatagaccacatccagtatcacttcgatgccggcatcatggaaagcgcgcaccatatcgcggaatccctgaataccttttggaccatagtagcgcgtcgccggcgcaaaaaagcccagcgagttgtatccccagaaatttttcagtcctttatcgagcagatgctgatcgtccgggaaccagtgaacgggtaaaagctcgacggaggtaatccccagacttttaatgtaatccacgctggctttatgccccatgccttcaaacgtaccgcgtagaggctcagggatcgcggaattaagctgggtaaagccttttacatgcgtttcataaataatggcgttcgaccacggtatggaaggccgttgtctatcctcccagttagcctcatccggatcaatcacccggcatttaggcgtaaatggcgcgctatcctggtcatcaaaggtcaaatctttatcgtcatgaagtaattgatacgcgaaatgcgcatcgttccactgaatatcgcccaccagctcacgggcataagggtcaataagcagcttgttggggttaaaacgatgaccattttccgggtcataaggaccgtaaacgcggtacccatacagcgcgccgggctgcaacttcgggacatagccgtgccatatttcgtcagtatattccggtaactccagacgagcgatttcatgctccccgctcggatcgtaaaggcaaagctcgacgcgttccgcatgggcggaaaaaatagcgaaattcacgccttcgccgtcataatttgcgccaagcgtatggctgtatcctgatctgatttcaaaagccctgtttgttgtcattctctttctccacccacggtaaacgttgtcctgtcacggcacatcaacacataaactcagtcgctcattaaaaccagtacgccgccctggtgtgaggccaacgacaggcgttcaccaggcattaacctctcctgggtaagcacattgcgataacgatgctgattaagctgtccgggtataataatgtcggttcctgaccagaaaccgctatgcgattgtgacaataagccgtcacattcggcgaacaccagtcggggcgcaacaacaatcagcgcatcatcatgattgactctggcgtaagcgatgaccttgtcggcacgctgaccaacagcccgcagcggtatatagtcgccaaaacggaagagctcatgattctgctgacgcagacgcagtaatgcggcggtgacatactgattcacctgcccgttcagccaactctcttcgcgcgagaaaactcccggcgtcagttggtctaactgctgcgccagcgtggcgaaatccggttcgcggcggttgtcgggatcgacaagactaaaattcaacgcctcgcttccctgatagatatcaggtactcccggcgcggttaatttgataacggtctgcgtcaggctgttaaccagtcctgcgcggatgaagggttgcaaggaacgataaaaatcctgcaaaaatgtctgattatccggcgccagtaaataacgggcgtaatcaagcattgccgtttcgtaagcctcattactgtccacccaatcggtacgcagcttcgcttcgcgtagcgctttctccacaaaggcttcaaagcgtgttttcagcgcgtttaggcctgtttcatcctgtggttgtagcaccgggggccagacgccggtcagcgcctgatataacatccacgtatccgccgattttggcgcagtgccatcattcaaaaatttgacatgggtctggttcatctgccgccagcgggcaaggcattcgctccactgctccggcgcttcggtaagcgtatacaggcgtgctcgcgcatcctcgcctcgcttggtatcgtgggtcgacgtaccggataacgcatcaggctgtcgcgcctgtcgggttttcatctcatggtgaaagcgttcgatggagaagtgatgcgtgacgggctcggcgccgacttcatttaacgccagtcccatgttttgacgaaagaaaagcgtatcctctaccgatttcgccatcagcggaccggtgagttgctggaaccgaacgcgaaactgtgtcgcctcctcctggctggaggcgggaacatcgccggtaagaagacggctcagaaatgtaagcgcttctggctgcggaggggtttcaagcgtctttacccgttccacaatacggtgtaacaggcaaatatcggtcggtggtagcccttctgccgtgccgtaagtgcgatatacgggaaaggcaattaataactcgcgtaacgcctgccgaacgacgctctcttcctgtgcgatctgtagctcgctggcaatcgacagcgcaagcgcgagcagccgggtaaattccccctcgaaattgcgatcgaccatcagcaatttagccgcccgtaattccgcccgcatatccactggcgcgccttttacggtctcgtaagcctggcgcagattgtctatctgctcatcgtcaaccagcacctccgccagcgaggcgataaattcatagcctgtggtgccggaaaccggccagtcatcaggaagttgctcgcctttagcgagaattttttccacggtgatatagcacgccggccccacttcctgacgtaaacgcgcaagataggctttcggatcggcaaggccgtcgatatgatcgatacgtaaaccgtcaaccgcccccgttctgaccagctccagaatcagccgatgtgtatcgtcgaagacggttttatcttccacccgcattcctaccagccctgtgacctcaaagaaacgccgatatgaaagcgagcgagcggcatcgcgccaggacattaatttccacggctggcgctcatgcaaatcagcaatagcggctttatcggtaagcgccagtatttcagcctcgcgcccctgccacgtcgccggcgcaagcggataatagttatcataataggcgaacgcgggtttacccgtagcgggatcgggcttgatcgcaatttctccgttttccagcacggcgtcaaacgtgtcgcctaaaaaaggcagcgtcagtcggcgcgaccagtcaatatcgaaatggcgcgcgtaacggctctccttgccatattcaagcacgtcgcgccaccaggcgttttccagcgagctggccatgtgattaggcacaatatcgatgatcaatcccagaccttgcgctttaagttcagccaccagtctttcaaatccttcgcgcccgccaatagaaggctcaatctcattcgcatcggtgacatcataaccatgcgttgacgctttggtggcggtaaagatgggtgaggcataaagatggctgatacccagatttttaaggtaaggcaccagcgccgcagcgcgatcgaaggtcatgccattgcgaaactgaaggcgatacgttgcagttgggatcatgatgcagactctccctgggctaagcggacaataagagaatgttgggaaagcgacccggtggattcattcggccaggcgaagagagtcttacccggtaaatcgggcagcaataccgtcgtggcgctaatattcagcgccagtgacagcgttcctcccggaaaacgccagctaacggcaataaacccgggcgcggtttgcaataccgttcctgagctctcacgggcagcggacaacagcggcacgatatgcttctggcgcaaaagcagtagttcgcgggtaaacgccagccacgctttaccctcttcactgtgctgttgcttccagttaagttttgagcgttgaaaggtctctggcgcattcgggtccggaacattttcccctgcatgatcggcaaactcttttgcgcgaccttcacgaacggcgcgggctaaatccccatggaaatcggtaaaaaaagaaaaggacggctttcgccatactcttcgcccataaaaagcagcggaatatgcggtgaaagcagcaacgtggcgagcaatacttttgttcgttcagcacccgccagggttatcagtctgtcgccctgggcgcggttaccgacctgatcgtgattctgaataaaatccacaaaagcgaccgggggttgtccggtactttttacgccgcgaggttcgccggtttgcggtgaaatttctccctgataagcgaatccttcggccagcgctcttgcgaggtgtttttccggggcatcagcaaaatcgttgtagtaggcctgggtctctccggtcgcaaaaacgtggacggcattatgaaaatcgtcattccattcggcggtaaacagcggcgcattgccatcctgatctcggggatgcagagaaataatattgcggctatcttcggtggtcagatgaatgggcctgtcggtaatgtcttcccgaatacgttgtgcgatttcaaccagcacatgcctggcgctactgtcctcaatctgatcgatagcgtcaaagcgtaagccgtcgagatggtattctgtcagccagtataacggcgcctcgatgatatagcgccgcacggcgtcgacatcataggcgataccatttccccacggcgtcatgcgctctttgtggaaaaacgccggcgccaatagcggtaaataatttccttccgggccgaaatggttcagcacaatatccaggacgacggaaagaccatacccatgcgcggcgtcaataaacgccttgaaatcatccggcgtcccataggcagaatgcggcgcgtaaagcagtacgccgtcatagccccagccacgctcgccgccaaattgcgcaacgggcatcacttcaataacggtaacgccgagttcagcgagataaggcagcttcgctattgcggcgcggaaggtgccttccggagtgaacgtgcctgtatgcatctcatacaccacggcctgctcccaacggctacctttccacccggtgttgcgccacgtgtagctgcctggatcaaccacatatgacggaccgttgacgtcagttttttgggcgcgggaagccggatcggggaccaccatgccatcgctgagtacaaagttatactccgtacctggcgtcaccccggcgacgtccagcgtaaaccagccgtcaccgttcgcctgcatttcctgatctttacccgcaagcctgagcataaccttttgctgaccggtggcccaaagacgaaagcggacaacatcagcggcgatatattcagccccccagcttttgcaaaaaatttttgaactcatttgtcgctccgtttaacccataacctctacaacatccgaagaacaagcatagactatggggctaatctttacgtgacgctgtcacttaacaggcattctttttcgtatctgcgtgtaaaaccgtggaattattgtcgggattgctcagatgtaccgaagtgcgcggtatcgcctcgcccgtgttcgccagagccctgaacacgctgtagctggataacctctccctgctcccaggcgttagcccccttaacaacgggatgttcaggcagatcctgccgctcgcgtttaatggcttgggtatcaattcccagacggcgatcccgatcggccagcagcgcggggtcaagctgcccgtcgccagtaaagcccatcatcagcgcagggatacccattggcagggttttatcccggtcggtatgccaggtgtgccaggtcttgccataagtattaacaatcttactcatcaacgctttatcagcgacctgcggtaagccaggcgccaccaggctaccggatttcacctcgtactggtggctgtgccacagttttttctcctcgggaggaagcgttttaaataaacgttcgctgataatgtactccacccccatcaggcgcgcgtttttcgtattgccgtcgtaaatcaccgcctgcatgacatcttcgttcaggacggtaacgtaatggtgcgcttccatctgtccgtttttatcaccgctataaaaatggaacccgtcaaggtaggtactgatggcatcgacaggtggtctggattgaatagccgccgcgcctgtttccagggtacgtaatttggcagaggttttttccccgggaataggtgtttgcggcggcgtattattggcgccgcatccggccagaaaaggaatgataaagagtgccagcggtaaaattttcattaggtctccatatagtgaaagggctctaatgaaaatagtgcaataccacgtgattggtagaagaaatggaagatgttatttgtgacggtgtcacaaatagtaaaacccgacacacaggccgggttttgatatcagtttactcttattttgagagttctttcttgatttcgtcttttattttgcttaattcactctgcgggtttttcttacaaagctcaacggctagcggcactgctgtcgtctcagtttcctggaaatctacgtagtccccgcctttaaaatcttcatcttcattcagcacccagaaagcgactggcgccatcgtctgcggattgaggtcaacaaactcctggcagctcatacctttaggcgtaacgtttgttttagtagtatctgttgccgcattcacgctaacactggttaccagcgctgccacgataatacctgctgtagcaagggagaatttattcattgttgttgctccaataattatataaataacctctacatctgcgcgttaacccgttaatgtagaacacagaaaataatacccctcctctctcaggaataaagatcaccctccgtgatatggctattattgatatttacgttgactgattttgatgtttgatgaataaagcaacatggcgagcagattttaaggcgaaaaagtaggccacgacaatagccgcagacgtggtctacggcgcgttgaggtgatagaaatacggcaggatctcagatagaccgggagcgagccctccgtctgaaagtatattcatcagcccgatcaacccatcgttaccgggctggagaggttatcaggcgttaagctggtagtcgagggtgatttccgcattcagaacctgcgataccgggcacccggcttttgctttctggatgatttgatcgaaagttgaagcatcaatatctgctaccgcgactttgctttgtagcgcaattttggtaatggcgaagcccgcctccaccttatcaagcgatacgtcagcggtggtgtcaatggatgtcggcgtaaatccagcctctcccagcatgagtgatagcgccatggagaaacaggccgcatgtgcggcgccaattaactcttccgggttggttccctgcgcgccttcgaaccgggtattgaatccatacggttgttgattaagcacgccgctttctgttgatacagtacctttaccccgtttgatgtcgccttcccagtgtgcctgacctttcttatggattgtcatttttgctctcctgttggctcaaaaaataaagtatagaccatgctgctaatctgcgttgtccatgccgatggaggtagcatgttgtcgattacccgcacttcagatatagaaaatagttgtatgttttttcagtgatgaatattaaaccaacagggctccctttctttaaagaatatatccctccttttgtccttactttttcttctggaggcgtattccattatgtatattttatatgtatattgagatttatcctatcccattgtaataaaggataaaaatcacaataagtagccttttaaatgtatattaattgaccactatttgtatgaggatatgtaattggcaaacgtaatatattttcttcaggggtaaacaattagagttccgccttgcgttaaaataactccaggactaatcttaaccacagccgcaaaaatatttgccatgctgaatacgaattaattttctgcgagccgtactaaataaatacatgttcacggaggcattatatgtttacttatcactcagcaaatacctcagcagcacaaccggccctggtcaacgcgattgaacaaggattacgcgcggagttaggcgttgtcactgaagatgatattttaatggagctgaccaaatgggttgaggcttccgacaatgacatcctcagtgacatctaccagcagaccatcaactatgtggtaagcgggcagcacccgactctgtaaaacctgctatgctgtatcggcaaccttaggggttacgtttctttcgcgtaagcgaatttgtccttaaaactagcaacaggattgaggagttaacatgaaatcgaaccgtcaggctcgtcatatacttggactggattacagaatttccaaccagcgtaaggttgttactgaaggcgacaccagcagcgtggtgaataacccaaccggcagaaagcgccgcgccgacagccaaaagtaatcgtacagtcctgaaatgacgttaaacaccattgcatctgcaatggtgtttttgtttataggaatgaccttaacgtctcacaatgctttatactcagggtcggttccctggtggaaggcaatatatgatgataaacgacggtgccagggacagttattcgaaaaagagtgagtaacatggaaactacaaccaagaaagcacgttccctttatatcccttacgctggccctgtattgctggaattccccctgttaaacaaaggcagcgcttttagcgtagaagagcgccgcaacttcaatttgtcagggctgctgccagaggtcgtcgagtcgattgaagaacaggccgaacgcgcctggctccagtatcaggggtttaaaacagaaatcgataagcatatttacctgcgtaacatccaggataccaacgaaacgctcttttatcgactggtgcaaaaccatcttgaagagatgatgccggttatctataccccgaccgtgggcgcggcctgtgagcgcttctctgagatttatcgccgggcgcgcggcgtatttatctcttatccgaaccgtcacaatatggacgacattttgcagaatgtgcctaaccacaacattaaagttattgtggtgacggatggcgagcggattctggggcttggcgatcagggcatcggcggaatggggatacctatcggtaagctgtcattatacaccgcctgcggcggcattagtccggcctatacccttcccgttgtgctggatgtcggcaccaacaatcaacagttactcaacgatccgctttacatgggctggcgtcatccgcgcattaccgacgatgagtattatgcgtttgtcgatgagtttattcaggccgttaagcagcgctggccagatatcctgctacagttcgaagatttcgcgcagaaaaacgcaatgccgctgttgacgcgctatcgtgatgagatttgctcctttaacgatgatattcagggcaccgcagccgtgaccgtcggtacgttgatcgccgccagccgcgctgccggcagtcagcttagcgagcagaaaatcgttttcctcggcgcgggttccgccggatgtgggattgctgaacagatcatcgcgcagactcagcgtgaaggtttaagcgaagatgccgctcgacagaacgtttttatggttgatcgcttcggcctgttgacggaccggatgcctaatttattgccgttccaggcaaaactggtgcagaaatgcgacaatctccagcactgggataccgaaaatgacgtgttgtcgctgctggatgtggtgcgtaacgtgaagccggatattctgatcggggtttccggccagaccgggctctttactgaagagatcatccgcgagatgcataagcattgccctcgcccgatcgtcatgccgctctctaatcccacctctcgcgtggaggccacgccacaggacattatcgcctggacggaaggcaacgcgctggtggcaaccggcagcccattctcgccggtcatctggaaagataaggtttatccgatcgcacaatgtaataacgcctatattttccccggcatcggacttggggttatcgcttccggcgcatcgcgcattactgatgaaatgctgatgtcagccagtgagacgctggcgaaacattctccgctggtgaataacggcgaaggattagtgttgccagcgcttaaagacatccaggtcgtgtcgcgcgctatcgcttttgccgtaggtaaaatggcgcagcaacaaggcgtagcggtgaaaacctctgcggaagcgctgcaacaggcgattgacgataacttctggaaaccggaataccgcgactaccgtcggacttccatttaatacgtacccggcggtgaatgccgccggatatcactttcttctttagttttggtgagtctgtcgacacacctgaattcctttccctgcttatttgtcaagctactaatattagccacctttatgtattgaacggggatttatcaggataatcctggctaaactattacattgtatttctgccgccttgcataactcatcagaaatattaatcctaaagaggtaatagcgccttacctgctattacttacctgctatgcagttcactattaataaaaggagaaggttatgaaagctgctgttgtcacacaagatcatcaggttgatgttactgagaaaacgctgcgtccccttcgccacggtgaagctttgctaaaaatggagtgctgcggcgtatgccataccgatctacacgtgaaaaacggcgatttcggtgacaaaaccggcgttattctgggacacgaaggcattggcgtcgtggcggaagtcggtcctggtgtcacctcgctgaaacccggcgatcgcgcgagtgtcgcgtggttttatgaaggatgcggacactgtgagtattgcaatacgggcaatgaaaccttatgccgcaacgtgaaaaatgccggttacacggtagatggcggtatggccgaagagtgtattgtcgtcgcggattatgcggtgaaagtaccggaaggtctggactctgcagcggcaagtagtattacctgcgcgggcgttaccacctataaagcggtgaagatttctcatattaaacctggccagtggattgccatctacggtctgggcggtctgggtaatctggccttgcagtacgcgaaaaacgttttcaatgcgaaagtgattgccattgatgtcaatgatggacaactgaaactggccgaggaaatgggcgcagatctgaccattaattcacgtacggaagatgcggctaaaattgtgcaggaaaaaaccggtggcgcgcacgcagcggtggttaccgcggtcgctaaggcggcgtttaattccgcagtagatgccgttcgcgccggaggccgcgtggtggcagtcgggttgccgccagaagccatgaaccttgatatccctcgcctggtgctggatggcattcaggttgtcggttcgttggtggggacacgccaggatctgaccgaagccttccagtttgcggcggaaggaaaagtcgtgccaaaagtcgctttacgtccgcttgaagatatcaacgttatttttaaagagatggaacagggacaaattcgtggccgtatggtcatcgatttccgtcgttaaacgatttgctgtggtcgtctgagtatacagacagcagatgaaaacaaggcgctaccaggatagcgccttgtttatcagattgcgaaagaattactgaataccttcttcgctctctttttttgcttccgccttctcgatttcacgataccagcgtggatgatgtttcttcgcccagcgacggctgaccttcccttcgatcatgcctttaatcgagcctttcacccaaaatgccatatacatatggatgaggatcgcgtgcattaaaataatgcccgccgccgcatgaatcaacaggctataacgcaccacctgcatggggaaatactgcgcgaaatacggacgccagataatcacgccagtcaccagcagcacaaaaatcatgctcataatggaccagaacatcatcttctgtccggcattgtatttaccgacatccgccaccttatgctcattgcctttcaatacttcgacaatatttttcagccacggaatatcttttttatccgggatgttgtggtggacgaaacgcacgaacataaacatcagcgcgatgaagatggcaataccgaagaacgggtgcaaaatacgtcccatctgcggcgtgccgaaagtttgcgtcaaccattgtagcgtcgggaagaaaaacgaaatccccgacagcgctaccaggaagaagcagatcaccaccgtccagtgacaggcgcggtcgacaaatttcgtgcgcacaatcattttcgacttactcatgatgatcctcctcatcgtcgtccgtttctttattcgggccaataccgatgtagtggtaaatcagaccggcgaaagtggcgataaagcccgctgcggccagcggttttagcgcccctttccacagattgattgaggtatcgatctgcggatctttcggcaagccgtggtacaactccggctgattggcatggtgcagcacatacatgacgtgcgtaccgccgacgccctgcgggttgtagataccggcatgttcaaagccgcgcgcttttaacttctccacgcgttgctcacccagttccagcatctcttttttggtgccgaagtgaatagccccggtcggacaagttttgacgcaggccggttcctggcccacgctgacgcgatcgacgcagagcgtacatttataaacgcggttgtcctctttgttgaggcgcggaatattaaacggacacccggcgatacagtaaccacagccgatacagtgttcagattgaaaatcaacaatcccgttcgcgtactggatgatagccccggcagatggacaggctttaagacagcctggatcttcacagtgcatacaaccatctttacgaatcagccactccagcttgccgttctgctcggtttcggtaaagcgcatcaccgtccaggacttggcgctgagatcggcagggttatcgtacaccccgacacaatgaccaacgttatcgcgaatatcgttccattcagaacaggctacctggcaggctttacagccgacacaggaggagacgtcgatcagtttcgcgacttcggctttgtaatcacgcgcctgcggaggcggcgtgatggcgtttgttgcggaccgtttaataatgtcctgcgtttccatagacatatgttcgcctcccttacgccttctcgatgttaactaaaaacgctttgtattccggcgtttgcgagttggcatcaccgacatttggcgtcagagtattggcgatatagcctttgcgcgcgacaccctcaaagccccagtgaatcgggatccccaccgtttcaacctgctgaccgttgacatgcagggtgcgaagacgacgagttaccaccgcgaccgcgcgaataaacccgcgtttactgctcaccttcacatagtcgccgttagcgatacctttcgctgccgccagcgtctcactgatctccacaaactgttccggctgagcgatagcgttaagtagcgcatgtttggtccaggtatggaaatgctctgtgaggcggtaagtcgtgcccacgtacggaaactgctccttcttacccatgcgcagcgcatcttcttcatacagacgcgccgccgggttcgagaccacattcgggtgcagcgggttagtgcccagcggcgtttccatcggctcgtagtgttcagggaacggcccttccgccattttatcaatagcaaacagacgtcccagcccttccggctgcatgataaatggattggtcccgctccccggcgccgcgttgttaaagtccggaatatcgttccctgtccacttcgcgccgttccactggatcagcatccgttttggatcccacggtttaccctgcggatccgccgaagcgcggttatacaatacgcgacggtttagcggccatgcccacgcccaacccagagtattgccaagccctgacgggtcggcgttatcacgtctggacatctggttgccctgctccgtccagctaccggtataaatccagcaggaggaggatgtcgtaccgtcatcgcgcagtaatgcaaaactgctcaacaactggcctttcctggcaagcagtgtaccgttggcgtcatagagatcttccagcgcatagccgttgttctctttcgccacttcttccgaatgcggttcatccggctgcttgtagttccagctcatcttcaatagtggttcggcgcctttaccgccttctgcgcgatacatttcacgcagacgatggtaaataccggccagaatctcgccgtcgttacgcgcttcgcccggcgcgtcctgacctttccagtgccactgtaaccagcgaccggagttagcgatagagccatcctcttccgcaaaacaggtagacggcagacggaagacttcggtctgaatcgttgtcggatcgacatcattagattcgccgtggttctgccagaacgttgacgtttcagtcaccagcggatcgataacgaccagatacttcagtttgcttaagctttgcaccactttgtttttgtccgggaaggacgccaccgggttaaagccctgacagaaatagccggtgactttcccgctatccatcatgttgaaatatttgatcacgtcataggactgatcccacttaggcagccaggcaaagccccagtcattctcttgctgcgccgcatcgccatagaaagatttcatcaggctgacgaagaacttaggataattaccccagtagttgacctgatcggccagcgtcgctttgggggtattcgctgccagataagtttgcagatcggcctgtttttccgatggcagcgtcagataacccggcaggctggtggagagcagtcctaaatccgttaagccctgaatattagagtggccgcgcaaggcgttcacaccgccgccagccatccccatattgccgagcagcaactggatcatcgccatagtacggatgttctgcgccccgacggtatgttgcgtccagcccagcgcatacaggaaggtggtagtgcgatccggaacgctggtagaggccaacacctcacacaccttcaggaaatccgctttcggcgtaccgcagatgttttccacgacgtccggcgtgtagcgcgaaacgtgctgcttcagcagattccacacacagcgtgggtgcgtcaacgtttcatcacgtttggcatagccgttttcatcaaactggtagttccaggaggatttatcgtactgacgcttttgggcgtcatagccgctgaaaagaccgtcatcaaaggcaaaatcatcccgcaccagcaggctggcgttggtgtaatgcttaacgtattcagcgttgattttgttattttcgatcaggtacagcaaaacgccggacagaaaggtaatgtctgtaccggaacgtattggcgcatagatatccgccaccgacgccgtacgcgtaaagcgtggatcaacgacaatcagcgtcgcatcgttattgtttttcgcttccatcgcccagcggaaacccaccggatgcgcttctgcggcattgccgcccatcaccatcacgacgttggcgtttttaatatccacccagtggttggtcatcgcaccgcgaccaaatgttggagcaagacttgctaccgttggtccgtgtcaaacgcgcgcctggttatctaccgccagcataccgagagaacgcgcaaacttctgcgtcagcatacccgtttcattgctggccgccgaggcgcacagcattccggtagagagccagcggttaaccgtgacgccctgctcattcttttcaataaagttggcgtcgcggtcggctttcattaatttagcaatacgagtgaaagcgtcatcccagctaatgcgctgccacttgtcggaacccggcgcgcggtattccggatagcgtaggcgatcttcactgtgaacatagtccagcaaaccggcccctttcgggcacagcgcgccacggcttaccggatgatccgggtcgccttcaatatggtaaatcgcttctttcgcgttttttgccccatctcccaggctatacattaatagcccgcaacctacggaacagtatgtgcaggagttacggatctcttttgcgcgcaacagcttatagtttcgcgcctgagccagggccattttaggggtaaaacccagtgcggccaccgttgttcccgccataccgcccgcgcagattttaaaaaattgtctgcggctgacgtccattgctttcctcttttttccacggatgcacgcctccttcgaactgcagcaaaacctcagcccaggatgcgtgtataacttcgcgaggaaactaacagcaaaatcgataacttttttgcgtcaaatcaatattgaaacggttccgctattaaatagccctatttttaaactgcaataactccagggaggtactaaaaaatgacactgcatggcatcgccctcggaaaaagtgctataagtggcagtttattttgcgcggtattcaggacagtcacaaagcatgacatcacaaaaagcaacgctaatagggcttgttgccatcgttctgtggagcacgatggttgggttaattcgcggcgtcagcgaaggtctcggaccggtaggcggcgcagccatgatctattcattaagcggtctgctgctgatttttaccgtcggattacctgatatccgccgtttcccggggcgatacctcatcgcaggcagcgtactgtttgtcagttatgaaatatgcctggcgctttctctcggttatgccgccactcgccatcaggctatcgaagtcggcatggttaactatttatggcccagcctgaccattctgtttgccattctttttaatgggcaaaaaactaactggcttattgttcctggattgcttattgcacttactggcgtttgctgggttctggggggcgagaatggtcttaatcccggagaaattatcagcaatgtcgccaccagtccgctaagttatttactggcatttcttggggcgtttatatgggcgacgtactgcacggtcaccaataaatatgcgcgtggttttaacggtatcaccgtctttgtgttactcaccgccgtggcgctgtggttacactattttcttacgccgcaacctgccatgatatttagcctaccggtgattgctaaactttttaccgcggcattaacgctggggtttgcctacgcagcatggaatgtgggcatacttcatggcaatgtgactatcatggccgtagggtcttattttacccccgtcatgtcctctgctctggcagcgctgttactcagctcaccactgtcattctccttctggcaaggcgcagtcatggtttgcgtaggttcgctactttgttggctggcaacgcggcggcgctaatagcgacgggcgggccgatattgatattaaatcgacccgctgtaccttgacactcttcataacacaactacgcttttatctattgcctgtgcgtatttaacgattttccattttcacgtgctcctcctgcgccataccaggattgcgctggtaaaaatgaattttataaaatcgttaaatatgttaatgtaatgatgtaattatattaacaaatatataattaacgttagcttgcaactgttattagtgcatataataatcagtggttactaccaaaaataaaaccataaacagcccaatagtcccctccgaaaatatatcttattagacagtccctatttgaattaatactctcaaatgtattaaggagatctcgatcacacaaattaaaataatttgtaatcttatgaaacttattattgaacttatgccactccgtcatttaaaaatagtctgccattgacaaacgcctcgtttaacaatggttgaggaaacacgctaagaaaattataaggattattaaaatgaaacttaagttagtggcagtggcagtgacttccctgttggcagcaggcgttgtaaatgcagccgaggtatataacaaagacggcaataaactggatctgtacggtaaagttcacgctcagcattatttctctgatgataacggaagtgatggtgacaaaacttacgcgcgtctgggctttaaaggcgaaacgcagatcaacgatcagttaaccggttttggccagtgggaatatgaattcaaaggcaaccgtactgaaagccagggcgctgacaaagacaaaacccgtctggcgtttgctggtctgaaattcgctgactacggttctttcgactacggtcgtaactacggcgttgcttacgacatcggcgcatggaccgacgttctgccagagtttggtggcgatacctggactcagactgacgtcttcatgactggccgtactactggtgttgccacctaccgtaacactgacttctttggcctggttgaaggtctgaactttgccgcgcagtaccagggcaaaaacgaccgtgacggcgcgtacgagtctaacggcgacggtttcggtctgtccgcaacgtatgagtacgaaggttttggcgtaggtgcggcctatgcgaagtctgaccgtactaacaaccaggtgaaagcagcgagcaacctgaatgctgcgggtaaaaacgctgaagtctgggctgctggtctgaaatatgatgcgaacaacatctacctggcgaccacctactccgaaacgctgaacatgaccaccttcggtgaagatgcagcgggtgatgcgtttatcgcgaataaaacccagaacttcgaagcggttgctcagtatcagttcgacttcggtctgcgtccgtccatcgcttacctgaaatccaaaggtaaaaacctgggtacttacggcgaccaggatctggttgagtacatcgatgttggcgcaacctactacttcaacaaaaacatgtccaccttcgttgattacaaaatcaacctgctggacgacagcgacttcaccaaagcggctaaagtgtctaccgacaacatcgttgctgttggtctgaactaccagttctaattttgttgtagtctgaatacaaagccagtcctttcagggctggctttttctcttgatgtagactcggtcataaggagtatgccgtgcagacgttcactggtcgttgtctttgcggacagagccattttaccgttgacgtcgaaatgctggatgtctatgcctgccattgtacgctgtgtcaaaaatggtcgggtggaatagccatgtatctggaagcctgcgggcaaccacagctagcccccctttccccggaaccgccatacttttcatcctcttcgcgcggcgaacgctacttctgttccggctgcgggtgtccgctgtggtttcggcttaccgataccgatcgctattttattccctggaccttactggaactgaacgaagttgatcgccgtcggctgattctggctgcggaaatttataccgagacccaacctgccttctggcgactgacggggcaatacgcacgcctcagcggtaaagaggttgaggaaatggactccccctgccagctagcgcattaagcgcttatctcaccaggcgttatgttatcggcgttgggcttttgccaggctgaaccacatccctaccgccagcaaaagaagcatactcccggcgctgcttaacgccacgctatgcgaccagataaaggcatgtctggcggcgtccagtattgcctgcccctgcgtgggcggtaggctattcgccaactgcacggcttctcccattgaagatgacgctctggcaatctcttgcgcctcaagcccggcaggcagacggatagacgcggagaagctacggcttaacaacagaccgaaaatggcaatgcccagtcccgcgcccagttcataagccatcgtttctatcgcgccggccgccgccgctttttctgccggcgcagcggccataattgccgacgtggaagccagcaatgcgctggcggcgctaaatcccagcagcgccatcagcccccaggcctgccattgttgggtgctgaaatccgtcatcgccaggccataaaaactcagcgcgcttaacgccatgccgcccgtcgcgaccagccgtagtcccagacgcgagaccagcacgcccgcaatcggcccgctgaatccactggcgaccattaccggcagcataaataccccggcctcataaggcgatagcccgtgaacaaactgcagctcttgcgccatcagcagctcaaaacccaccagagtgatcatcgcggtcatcgccatcacgacgccgctcaggataatgcgatgggtaaatagtcgcatatcaatcatcggacgcgatgtcgcaagctgtgtgcggataaagagtcccaggagcagcgcgccggtaagcagggtaaacgagataacccacagcgacagatgccctttcagcgcggttttagcgctatagaccaacagcaaaatggcaataatcagcatcaccgcatggccaagattgagcggttgatcgcgacggcccgcctggcgaggaacatagcgggcggttaagcccatgacgaccagcacaatcggcacgttgatcaggaaaaccgatccccagtaaaaatgctctaataatatgccgccgatgagcggcccaaacgccgctccgcccgaacctaccgctgcccagacgcccagcgccatgttgcgatgcttctcttcacaaaaggtagcgcgtattccggccagcgtcgccggtacaatcatcgccgcgccaatagccagtaataccctggtggcgataagccaactggcggtatgcgaaaacgctgccgccaatgacgccaggccaaagagcgtcccgcccagcatcagcaggcgtttaaaaccgatacgatcgccaagtgcgcccatcggcaacaccatgccagccatgaccaaagaataaatatcaatgatccacagcagctcgttgccgctggcccccagtgtcatactcagtgtcggcgcggcgacatgcaagaccgtggcatcaatggcgacaggaatatagaccagcacaataatgactaacgttaaccactgacgaaacataactctcccttcaaaaactcaaatttggacgcttgtccagcttcaggatcctacggtaagttgaacgaatgtccagctttttgttacactgcgcgcattggctaatgtggggaaatatgagttaccttaaccgggatgaacgccgcgaagtgatcctgcaagcggcgatgcgcgtggcgctggcagaggggtttgccgccatgacggtgcgacgaatcgcatcagaagccgatgtcgccgccggccaggtgcatcaccacttcagctcggcgggcgagctcaaagcgctggcctttgtccatttgatccgcaccctgcttgatgccgggcaagttccgccgcccgccacctggcgtgcacggcttcacgctatgttgggtagcgaagacggcggctttgagccttacataaaattgtggcgagaggcgcaaattctggccgaccgggatccgcacatcagagatgcttatctcctcacgatgcagatgtggcatgaggaaacggtcacaattatcgagcagggcaaacaggcaggagaatttacgtttactgctaacgccacggatatcgcctggcggcttatcgcactggtgtgcgggctggacggtatgtatgtactggggattccggaaatggccgatcccgcgtttaaattccatctggatcgtatgattacgcttgaactctttgcgtaaagttacaaataatttaataaaaatcgcttttaatttacaaatagtaacaattaagaaacatcatatctcctcatcgcgccgcgctggcctggttttttatctattctttcactcaatattctaaaaaaacttcaataagttctcaaaagagcgcgtgacgctctgtctcttttttgtgtttttcttcaaatgatatgcgcatgtgaggggtaaaatgacacgacaaaacgagaattataaccgttatctcttgagtgactggcgacccgaaaatccagccttctgggagaataaagggaaaggcatcgccagaagaaacttatggatttcagtaagttgtttgctcctggcattttgcgtctggatgttgtttagcgctgttgccgtcaacctcaataaaattggatttaattttaccaccgaccaactctttttattaaccgcattaccttctctttccggcgcaatattacgcgttccctactcctttatggtgccactgtttggtggtcgtaaatggaccgtattaagcaccgtaatattgattattccctgcgcctggctgggattcgccgtacaaaatcccgccacccctttcggggtatttatgctcatcgctctgttgtgcggttttgcgggggcaaacttcgcgtccagtatgggcaacatcagttttttctttccaaaagccagacaaggtagcgcgttgggtattaacggcggactgggaaatcttggcgtcagtgtgatgcagttgattgcgccgctggttatttttctgccgatatttacttttttaggcgtccagggcgtgccgcaacctgatggctccctgctcgccctcactaacgccgcctggatctgggtgccgttactggctgtcgcgacgcttgccgcctggtttggtatgaacgatatcggcagttcaaaagcgtctgtcgcctcgcaattgccggtgctaaaacgtctgcacctgtggctgcttagcctgctgtacctggcgacattcgggtcattcatcggcttttccgcaggtttcgccatgctcgccaaaacgcaatttcccgacgtaaacattctgcaactggcgttctttggcccctttatcggcgcgctggcgcgatcggcaggcggcgtgatctccgataaattcggcggcgttcgcgtaacgctcattaattttatctttatggcgctgtttaccgccttgctattcctcacgctgccaggctccggcgcaggcagctttagcgcgttctatcttgtttttatgggcctgtttttgacagcgggtctcggcagcggttctaccttccagatgattgcggtgatcttccggcagatcacgctctacaacgtcaaactgcgcggcgggagcgatgagcaggcgcagcgcgaagcggtgacggataccgccgccgcgctcggttttatctccgctattggcgctgtgggcggcttctttattccaaaagcgtttggcacctctttggccttgaccggctcgccggtgggcgccatgaaaatctttttgctgttttacctcgcttgcgtcctgctgacctggctggtctacgggcgtcgtaagcctaaacaacaataacaacatacgcacctgtaggacggccatccggtaatggtttaacgccaaatcgacaggatggcggaaaatttatcgaagcaggagaaatgtcatgagtaaactgttggatcgctttcgttactttaaacaaaaaggcgatacctttgccgacggccatggtcaggtgatgcataccaaccgcgactgggaagacagttatcgccagcgctggcagtttgataagatcgtgcgctcaacccacggcgtcaactgcacgggctcctgtagctggaaaatttatgtcaaaaacggtctggtgacgtgggaaacccagcaaaccgactacccgcgcacgcgtcccgatttaccgaaccatgaaccgcgcggctgcccgcgcggcgccagctactcctggtatctctatagcgccaatcgtctgaaataccctctggtgcgtaagcggctgatagaactgtggcgcgaggctctttcccggcacagcgatccggtgctggcatgggaatctataatgaacgacccgcaaaaatgccaaagttacaaacaggtgcgcggacatggcggctttattcgttcgaactggaaagagctgaatcagctcattgccgccgctaacgtctggacaatcaaaacctatggtccggatcgtgtggcggggttttcacctattccagcaatgtcgatggtttcttacgccgccggaacacgttatctgtcattgcttggcggtacttgtctgagcttctatgactggtattgcgatcttccgcccgcgtcgccaatgacctggggcgagcagactgacgtgccggagtccgccgactggtataactcagcctacattattgcctggggctctaacgtgccgcagacgcgtaccccggacgcccacttctttaccgaagtgcgctacaaaggcaccaagacgatcgccatcaccccggactattccgaagtcgctaaactgtgcgatcagtggctggcgccaaagcaaggtaccgacagcgcgctggcgatggccatgggtcacgttattttaaaagagtttcatctcgataatcccagcgactattttcttaactattgccgccgttataccgacatgccaatgctggtcctgttggatgagcgcgcagacggcagttatgtaccggggcgtatgatgcgcgcgtcggatctggtggatggactgggagaagccaataatccggaatggaaaaccgtcgcgctcaacagtacgggcgaactggtcgcgcccaacggttctatcggttttcgctggggcgaaaagggaaaatggaacctggaaccggtggcggcgggcgtcgaaactgaactgtcgctctctttactcggtcagcatgatgacgtggcgggtgtcgctttcccctattttggcggcaacgaaaacccacattttcgcagcgtgcggcaggaaccggtgctggtacgtcagttaccggtgaaacgcctggctctggcggacggtagcgagcggatggtcgtcagtgtttacgatctggtgctggcgaattatgggctggatcgtggtctggatgacggccatagcgccaataattataacgacgtaaaagcctacacgccggcctggggcgaacagattaccggcgtgccgcgtcgacatatcgaaactattgcgcgtgaatttgccgagaccgcccataaaactcacggtcgttcgatgatcatcctcggcgcgggagtgaatcactggtatcacatggatatgaattaccgtgggatgattaacatgctggtgttctgcggctgtgttggacaaaccggcggcggctgggcgcactatgtcggccaggagaagctgcggccgcaaaccggctggctgccgctggccttcgcgctggactggaatcgcccgccgcgtcagatgaacagtacctcgtttttctacaaccatgccagccagtggcgctatgaaaaactgactgcgcaagagttgctgtcgccgctggccgatccggctaaattttccggacacctgatcgatttcaacgtgcgcgcggaacgtatgggctggctaccctcggcgccgcagcttaatcttaacccgctcagcgtgaaagcgagcgccgataaagccgggctgtctgcggcggattataccgtgcaggcgttgaaatcaggcgctatccgttttgcctgcgaacagcctgacagtggtcataatcacccgcgaaatttatttgtctggcgctctaacctgctcggctcctccgggaaaggtcatgagtacatgctcaaatatctgctgggcacagacagcggtatctagggcgaagcgctgggttccagcgaaggaattaagcctgaagaggtggaatggcagtccaccgcgattgagggcaagctcgatctgttggtcacgcttgatttccgtatgtccagtacctgtctgttttccgatatcgttttgccgaccgccacctggtatgaaaaagacgatatgaatacctcggatatgcatccgtttatccaccccctttccgctgcggtcgatcctgcctgggaatccaaaagcgactgggagatctacaaaggtatcgccagcgtcttttctgaagtgtgtgtcggacacctcggacaggaaaccgatgtggtgctacacccgctccagcatgattccccggcggaactggcgcagccatttgatattctcgactggcgtaaaggcgagtgcgaacttattccgggcaaaaccgcccccaatatcgtcgtggttgaacgcgattatccggccacctatgaacgttttacctcgctgggtcccctgctggataaattaggcaacggcggtaaggggattgcctggaatacgcaagatgaagtcgatttcctcggtaagctcaattacaccaaacacgatggcccggcgaaaggacgtccgcgaatagacaccgcgctggatgcttcggaagtgattcttgccttagcgccggaaactaacggccaggtggcggtgaaagcctggcaggcattgggcgagatgaccgggcgcgagcacacccatctggccatcaataaagaagatgagaaaattcgctttcgtgatatccaggcgcaaccgcgcaaaattatctccagcccgacctggtcaggactggaaagcgagcatgtctcttataacgccggatataccaacgtacatgaactgatcccgtggcgcacgttgtcggggcggcaacaactctatcaggatcatgcgtggatgcgcgcttttggcgaaagcctggtggcatatcgtccgccgattgatacccgcagcgtcagcgaaatgcgagaaattccgcccaacggtttcccggaaaaagcgcttaacttcctgacgccgcaccagaaatggggaattcactccacctacagcgaaaacctgctgatgctgaccttgtcgcgcggcgggccgattgtctggatcagcgaagccgatgcccgtgaattgggtattgaagataacgactggattgaagccttcaacgctaatggcgcccttaccgctcgtgcggtggtcagccagcgcgtcccgccgggtatgaccatgatgtaccacgcccaggagcggattatgaacattccgggttcggaagtgaccgggatgcgcggcgggatccataactccgtgacccgggtctgtccaaaaccgacgcatatgatcggcggctatgcgcaactggcttacggcttcaactattacggaaccgtgggttcgaatcgcgatgaattcatcatgatcaggaagatgaaaaacattaactggctggatgatgagggccgggatcaggtacaggaggcgaaaaaatgaaaatacgctcacaggttgggatggtactgaatctcgataaatgtattggctgtcacacctgctccgtcacctgtaaaaacgtctggaccggacgtgaagggatggaatacgcatggttcaataacgtcgaaactaaaccaggcatcggctatcccaaaaactgggaggaccagcaggagtggcaaggcggttgggttcgtgatgttaatggcaagataaggccccgtctgggcggcaaaatgggggtaattagcaaaattttcgccaacccggtgattccgcaaatcgatgattactatgaaccctttaccttcgattatcagcatttacataatgcgccggagagtaagcatcagcccactgcccgccctcgttcactgatcgacggaaaacggatggacaaggtgatctgggggccaaactgggaagagctgctcggcggcgagtttgaaaaacgcgcccgcgaccgcaacttcgacaacatacaaaaagagatgtacggtcagttcgaaaacaccttcatgatgtacctgccgcgcctgtgcgaacactgcctgaaccccagttgtgtcgccacctgcccaagtggcgctatttataagcgtgaagaagacggcatcgtgctaatcgaccaggataaatgccgaggctggcgtttgtgtatcagcggctgcccgtacaaaaaaatctactttaactggaagagcggcaagtctgagaagtgcatattctgctatccgcgtattgaatccggccagccgaccgtttgctcggaaacctgcgtcgggcgcattcgttatcttggcgttctgctctacgacgccgacaggattgaagaagcggccagtaccgaacacgagacggatttgtatgaacgtcagtgcgatgtgtttctcaatccgcacgatccggcggtcatcgaagaggcgcttaaacaaggcatcccgcaaaacgtcatcgacgccgcccaacggtcgccggtgtacaaaatggcgatggactggaagctggcgcttccgctgcacccggaataccgtaccctgccgatggtctggtacgtaccgccgctatcgcccatccagtcatacgctgacgcgggcgggttgccgcacaatggcaatattctgccggcggtggaaacgctgcgtattccagtccagtacctggccaatatgctcagcgcgggcgataccggcccggtcattcgggcgctaaagcggatgatggcgatgcgccactacatgcgctcgcagacggttgaaggcgtgacggatacccgcgccattgaggaagtcggtctgagcatacaacaggttgaagagatgtatcgctacctggcgattgccaattatgaagatcgttttgtcattcccaccagccaccgggaaatggcgcgcgatgcctttccggagcgcaacggctgcggctttacttttggcgacggttgccacgggtcggataccaaattcaacctgttcaacagtagccgtattgatgccatcaatatcaccgaagtacgtgataaagcggagggggaataatgcaaatcctcaaagcgattggcctgttgatggagtatccggacgacgagttgtgggaatgtcgggatgaagcgctcacccttatccaacacgatgcgccaatgctggccgacttcactcgcgagctgctttatgcgccgttactggataaacaagcagaatggtgtgaagtgtttgaccgcgggcgcgccacttcattgctgttattcgagcatgttcatgcggagtcccgcgatcgcggccaggcgatggtcgatttgttaagccaatatgaaaccgtgggcctgcacctcaactgccgcgaactgccggatcacctgccgctctatctggagtacttaagcgtgttgccggaagcggaagcgcgcgagggattacagaatattgcccctattctggcgctactgggcggtcgcctgaaacagcgaggagcgccgtggtatcaactgtttgacgccctgctgacgctggcgggcagcacgcttacaagtgacagtgtcaccaaacagattattcaggaatcgcgggatgatacccgtcaggcactggatgccgtctgggaagaagaacaggtgaagtttatcgaagataacgccacgacctgtgacagttcaccgttacaccattatcaacgacgctttagccaggacgcggcgccgcagtacgtcgacgtcagcgcgggaggcccgaaatgatacagtacctgaacgtctttttttacgacatctacccctatatttgcgccacggtattcttcctcggcagttggctgcgctatgactacggacaatatacctggcgcgcgtcgtccagccagatgctggacaagcgtgggatggtgatatggtcgaatctgttccatattggcattctggggatcttctttggccatctgtttgggatgctaacgccacactggatgtatgcctggttcctgccgattgcggtaaagcagcagatggcgatgatcctcggcggcgtgtgcggcgtattaacgttgatcggcggcgcgggattactgtggcgtcgtctgaccaatcagcgtgtgcgggcgacatccactacacctgatattatcatcatgagcattttgctgattcagtgcctgcttggcctgagcaccattccgttttcggcgcaatatccggatggcagcgaaatgatgaagttggtgggctgggcgcaaagtattgtcaccttccgcggcgggtcttcggaaatgctgagcggtgtggcgtttgttttccgcgttcatctggtgctgggaatgactattttcctgctcttcccgttcacccgtctggttcatgtctggagcgcgccgtttgagtatttcacccgtcgctaccagattgttcgtacccgccgctaattctctttgcccggggatacgcttaccgggcaaagaaaaacgcctgggcgtcgtcattcggcaacgcacaggctatgatgattcttcagtcaaaggagaacatcaatgaaaccgcagatttaccatgttgacgccttcaccggcgacccctttcgcggcaactctgctggcgttgtcttacatgcggatacgctaagcgacgcgcagatgcagctgattgcccgtgaacttcgtcactcggaaaccgcctttttgctaaaaagcgaagagagtgatgtgcgcatacgctactttacaccgacagtagaagtccccatctgtggtcatgccaccgtggccgcgcattatgttcgggcaacggtactggggttgggaaacaccaccgtctggcaaacctcgttagcgggccgtcatcgcgttgaaattcatgccgaacacaacgactatcgcatcacgctggaacaaggtcagccctcttttgaaccaccgctagtcggagagattcgggctgccatcatcaccgcactgaacctgactgaagatgatatcgtgccgggagcgccaattcaggtggcttcaacaggacatgcaaaagtgatgatcctgctcaaaccagacgttgatattgatgccctttctcctaatctggcagccctgacggcaatcagccagcaaattggctgtaacggcttttttcctttccagattcgtccgggaaaaaacgaaaccgatgggcgaatgttttccccggcgataggaattgtggaagatccggtaacgggaaacgccaatggcccgatgggggcatggctcgtccatcatggcctgatggcgcatgacggtaaaacgctgcagattcaaggccatcaggggcgcgctttaggcaaagagggtactgttgatgttaccgtcaccattcgcgataaccagccggaaaacgtcaccatctccggccaggcggtcattctgtttcatgccgaatgggccattactttttaatctttgtcaggcccgcaaatcctcgcggcaaaaaattattttcccgcctctggatgggtatcaaatgcagccattaccgcggccagctccgcctcggtaaaaccgtgctttacatcatttacgccgagaccaaactgctgctgaagtaactgatacaacgacggtacatccggtacattgacctgttcaacggcatgtccctggtggtaacgcgtgaagtggaaattcgttaatgtcagcttgccgccatcaggcaaatggcggcacatcaacaaatgatgacgaaaatgggattgcggccagtgagccgaccagaaattgcccatcacatg

(The sequence listing continues in the following parts.)
